(19) United States
(12) Patent Application Publication
(10) Pub. No.: US 2012/0297505 A1
(43) Pub. Date: Nov. 22, 2012

(54) TRANSGENIC PLANTS HAVING INCREASED BIOMASS

(76) Inventors: Chuan-Yin Wu, Newbury Park, CA (US); Han-Suk Kim, Pinole, CA (US); Gerard Magpantay, Canoga Park, CA (US); Fasong Zhou, Fremont, CA (US); Julissa Sosa, Northridge, CA (US); Greg Nadzan, Thousand Oaks, CA (US); Roger I. Pennell, Malibu, CA (US); Mircea Achiriloaie, Thousand Oaks, CA (US); Wuyi Wang, Newbury Park, CA (US)

(21) Appl. No.: 13/385,000

(22) PCT Filed: Jul. 20, 2010
(86) PCT No.: PCT/US10/42602

§ 371 Date: Jun. 11, 2012

Related U.S. Application Data
(60) Provisional application No. 61/226,969, filed on Jul. 20, 2009.

(51) Int. Cl. A01H 5/00; C12N 15/82; C12N 5/04; C12N 5/10; A01H 5/10

(52) U.S. Cl. 800/290; 435/419; 800/298; 800/320; 800/320.3; 800/312; 800/320.1; 800/306; 800/314; 800/320.2; 800/322; 435/410

(57) ABSTRACT

Methods and materials for modulating biomass levels in plants are disclosed. For example, nucleic acids encoding biomass-modulating polypeptides are disclosed as well as methods for using such nucleic acids to transform plant cells. Also disclosed are plants having increased biomass levels and plant products produced from plants having increased biomass levels.

### CROSS-REFERENCE TO RELATED APPLICATIONS

[0001] This application claims the benefit of U.S. Provisional Application Ser. No. 61/226,969, filed on Jul. 20, 2009. The disclosure of the prior application is incorporated by reference in its entirety.

### TECHNICAL FIELD

[0002] This document relates to methods and materials involved in modulating biomass levels in plants. For example, this document provides plants having increased biomass levels as well as materials and methods for making plants and plant products having increased biomass levels.

### BACKGROUND

[0003] The present invention relates to methods of increasing biomass in plants and plants generated thereby. Plants having increased and/or improved biomass are useful for agriculture, horticulture, biomass to energy conversion, paper production, plant product production, and other industries. In particular, there is a need for increases in biomass for dedicated energy crops such as Panicum virgatum L. (switchgrass), Miscanthus×gigantus (miscanthus), Sorghum sp., and Saccharum sp. (sugar cane). Throughout human history, access to plant biomass for both food and fuel has been essential to maintaining and increasing population levels. Scientists are continually striving to improve biomass in agricultural crops. The large amount of research related to increasing plant biomass, particularly for dedicated energy crops, indicates the level of importance placed on providing sustainable sources of energy for the population. The urgency of developing sustainable and stable sources of plant biomass for energy is underscored by current events, such as rising oil prices. The amount of biomass produced by plants is a quantitative trait affected by a number of biochemical pathways. There is a need for molecular genetic approaches to more rapidly produce plants having increased biomass. There is also a need to produce plant species that grow more efficiently and produce more biomass in various geographic and/or climatic environments. It would be desirable for such approaches to be applicable to multiple plant species (Zhang et al., Plant Physiol. 135: 615-621 (2004)). Despite some progress in molecular genetic approaches, there is also a need to identify specific genes and/or sequences that can be used to effectively increase biomass in plants.

### SUMMARY

[0004] This document provides methods and materials related to plants having modulated levels of biomass. For example, this document provides transgenic plants and plant cells having increased levels of biomass, nucleic acids used to generate transgenic plants and plant cells having increased levels of biomass, methods for making plants having increased levels of biomass, and methods for making plant cells that can be used to generate plants having increased levels of biomass. Such plants and plant cells can be grown to produce, for example, plants having increased height, increased tiller number, or increased dry weight. Plants having increased biomass levels may be useful to produce biomass for food and feed, which may benefit both humans and animals. Plants having increased biomass levels may be useful in converting such biomass to a liquid fuel (e.g., ethanol), or other chemicals, or may be useful as a thermochemical fuel.

[0005] Methods of producing a plant having increased biomass are provided herein. In one aspect, a method comprises growing a plant cell comprising an exogenous nucleic acid. The exogenous nucleic acid comprises a regulatory region operably linked to a nucleotide sequence encoding a polypeptide. The Hidden Markov Model (HMM) bit score of the amino acid sequence of the polypeptide is greater than about 130, 340, 530, 120, 635, 65, 100, 480, 145, 280, or 1000 using an HMM generated from the amino acid sequences depicted in one of FIG. 1, 2, 3, 4, 5, 6, 7, 8, 9, 10, or 11, respectively. The plant has a difference in the level of biomass as compared to the corresponding level of biomass of a control plant that does not comprise the exogenous nucleic acid.

[0006] In another aspect, a method comprises growing a plant cell comprising an exogenous nucleic acid. The exogenous nucleic acid comprises a regulatory region operably linked to a nucleotide sequence encoding a polypeptide having 80 percent or greater sequence identity to an amino acid sequence set forth in SEQ ID NOs: 1, 2, 4, 6, 8, 10, 11, 12, 13, 14, 15, 16, 17, 18, 20, 22, 24, 25, 27, 29, 30, 32, 33, 34, 36, 37, 38, 39, 40, 41, 43, 45, 47, 49, 50, 51, 53, 54, 56, 58, 59, 61, 63, 64, 66, 68, 70, 71, 72, 74, 75, 77, 79, 81, 82, 84, 86, 87, 88, 90, 92, 94, 96, 98, 100, 102, 104, 106, 108, 110, 112, 114, 115, 117, 118, 120, 121, 122, 123, 125, 127, 129, 131, 132, 133, 135, 137, 139, 141, 142, 144, 145, 146, 147, 149, 151, 152, 153, 154, 155, 156, 158, 160, 162, 163, 164, 166, 168, 169, 171, 173, 174, 176, 178, 180, 182, 184, 185, 186, 188, 189, 190, 191, 193, 194, 195, 196, 198, 200, 202, 203, 204, 206, 207, 209, 210, 212, 214, 216, 218, 220, 222, 224, 226, 228, 230, 232, 234, 236, 238, 239, 241, 242, 243, 244, 245, 246, 247, 248, 249, 250, 251, 253, 255, 257, 259, 261, 263, 264, 266, 268, 269, 271, 273, 275, 276, 278, 279, 281, 282, 283, 285, 287, 289, 291, 292, 294, 295, 296, 297, 298, 299, 300, 302, 304, 305, 306, 308, 310, 311, 312, 314, 315, 317, 319, 320, 321, 323, 324, 326, 327, 329, 331, 332, 334, 336, 337, 338, 340, 342, 343, 345, 347, 349, 351, 353, 354, 356, 357, 359, 361, 363, 365, 367, 369, 371, 372, 374, 376, 378, 380, 382, 384, 386, 388, 390, 391, 393, 395, 397, 399, 401, 403, 405, 406, 407, 409, 411, 413, 415, 416, 417, 418, 420, 421, 422, 424, 426, 428, 429, 430, 431, 433, 435, 436, 437, 438, 439, 440, 442, 444, 446, 447, 448, 449, 450, 452, 453, 454, 455, 456, 457, 459, 461, 463, 464, 466, 467, 468, 470, 472, 474, 476, 478, 479, 480, 482, 483, 484, 486, 488, 490, 492, 493, 495, 497, 499, 500, 501, 502, 503, 504, 506, 508, 509, 511, 513, 515, 516, 517, 518, 519, 521, 523, 525, 526, 528, 529, 531, 532, 534, 536, 537, 539, 540, 541, 543, 545, 547, 549, 550, 551, 552, 554, 556, 558, 560, 562, 563, 565, 567, 569, 571, 573, 574, 575, 577, 579, 581, 583, 585, 587, 589, 591, 593, 595, 597, 598, 600, 602, 603, 604, 605, 606, 608, 609, 610, 611, 613, 615, 616, 618, 619, 620, 622, 623, 625, 627, 629, 630, 632, 633, 634, 636, 637, 638, 639, 641, 642, 643, 645, 647, 649, 651, 652, 653, 655, 657, 659, 660, 662, 664, 666, 667, 669, 670, 671, 672, 673, 674, 675, 676, 677, 689, 691, 693, 695, or 697. A plant produced from the plant cell can be used to generate a plant that has a difference in the level of biomass as compared to the corresponding level of biomass of a control plant that does not comprise the exogenous nucleic acid.

[0007] In another aspect, a method comprises growing a plant cell comprising an exogenous nucleic acid. The exogenous nucleic acid comprises a regulatory region operably linked to a nucleotide sequence having 80 percent or greater sequence identity to a nucleotide sequence, or a fragment thereof, set forth in SEQ ID NO: 3, 5, 7, 9, 19, 21, 23, 26, 28, 31, 35, 42, 44, 46, 48, 52, 55, 57, 60, 62, 65, 67, 69, 73, 76, 78, 80, 83, 85, 89, 91, 93, 95, 97, 99, 101, 103, 105, 107, 109, 111, 113, 116, 119, 124, 126, 128, 130, 134, 136, 138, 140, 143, 148, 150, 157, 159, 161, 165, 167, 170, 172, 175, 177, 179, 181, 183, 187, 192, 197, 199, 201, 205, 208, 211, 213, 215, 217, 219, 221, 223, 225, 227, 229, 231, 233, 235, 237, 240, 252, 254, 256, 258, 260, 262, 265, 267, 270, 272, 274, 277, 280, 284, 286, 288, 290, 293, 301, 303, 307, 309, 313, 316, 318, 322, 325, 328, 330, 333, 335, 339, 341, 344, 346, 348, 350, 352, 355, 358, 360, 362, 364, 366, 368, 370, 373, 375, 377, 379, 381, 383, 385, 387, 389, 392, 394, 396, 398, 400, 402, 404, 408, 410, 412, 414, 419, 423, 425, 427, 432, 434, 441, 443, 445, 451, 458, 460, 462, 465, 469, 471, 473, 475, 477, 481, 485, 487, 489, 491, 494, 496, 498, 505, 507, 510, 512, 514, 520, 522, 524, 527, 530, 533, 535, 538, 542, 544, 546, 548, 553, 555, 557, 559, 561, 564, 566, 568, 570, 572, 576, 578, 580, 582, 584, 586, 588, 590, 592, 594, 596, 599, 601, 607, 612, 614, 617, 621, 624, 626, 628, 631, 635, 640, 644, 646, 648, 650, 654, 656, 658, 661, 663, 665, 668, 678, 679, 680, 681, 682, 683, 684, 685, 686, 687, 688, 690, 692, 694, or 696. A plant produced from the plant cell has a difference in the level of biomass as compared to the corresponding level of biomass of a control plant that does not comprise the exogenous nucleic acid.

[0008] Methods of modulating the level of biomass in a plant are provided herein. In one aspect, a method comprises introducing into a plant cell an exogenous nucleic acid that comprises a regulatory region operably linked to a nucleotide sequence encoding a polypeptide. The HMM bit score of the amino acid sequence of the polypeptide is greater than about 130, 340, 530, 120, 635, 65, 100, 480, 145, 280, or 1000, using an HMM generated from the amino acid sequences depicted in one of FIG. 1, 2, 3, 4, 5, 6, 7, 8, 9, 10, or 11, respectively. A plant produced from the plant cell has a difference in the level of biomass as compared to the corresponding level of biomass of a control plant that does not comprise the exogenous nucleic acid.

[0009] In certain embodiments, the HMM score of the amino acid sequence of the polypeptide is greater than about 340, using an HMM generated from the amino acid sequences depicted in FIG. 2, wherein the polypeptide comprises a D of domain zinc finger, having at least 60 percent or greater (e.g., 65, 70, 75, 80, 85, 90, 95, 99, or 100%) sequence identity to residues 130 to 192 of SEQ ID NO: 263, or D of domain zinc fingers identified in the sequence listing.

[0010] In certain embodiments, the HMM score of the amino acid sequence of the polypeptide is greater than about 530, using an HMM generated from the amino acid sequences depicted in FIG. 3, wherein the polypeptide comprises a pytochelatin synthetase-like domain having at least 60 percent or greater (e.g., 65, 70, 75, 80, 85, 90, 95, 99, or 100%) sequence identity to residues 44 to 208 of SEQ ID NO: 117, or pytochelatin synthetase-like domains identified in the sequence listing.

[0011] In certain embodiments, the HMM score of the amino acid sequence of the polypeptide is greater than about 120, using an HMM generated from the amino acid sequences depicted in FIG. 4, wherein the polypeptide comprises a AP2 domain having at least 60 percent or greater (e.g., 65, 70, 75, 80, 85, 90, 95, 99, or 100%) sequence identity to residues 32 to 83 of SEQ ID NO: 1, or AP2 domains identified in the sequence listing.

[0012] In certain embodiments, the HMM score of the amino acid sequence of the polypeptide is greater than about 635, using an HMM generated from the amino acid sequences depicted in FIG. 5, wherein the polypeptide comprises a Aminotransferase class I and II domain having at least 60 percent or greater (e.g., 65, 70, 75, 80, 85, 90, 95, 99, or 100%) sequence identity to residues 88 to 453 of SEQ ID NO: 645, or Aminotransferase class I and II domains identified in the sequence listing.

[0013] In certain embodiments, the HMM score of the amino acid sequence of the polypeptide is greater than about 100, using an HMM generated from the amino acid sequences depicted in FIG. 7, wherein the polypeptide comprises a Myb-like DNA-binding domain having at least 60 percent or greater (e.g., 65, 70, 75, 80, 85, 90, 95, 99, or 100%) sequence identity to residues 13 to 62 of SEQ ID NO: 323, or Myb-like DNA-binding domains identified in the sequence listing.

[0014] In certain embodiments, the HMM score of the amino acid sequence of the polypeptide is greater than about 480, using an HMM generated from the amino acid sequences depicted in FIG. 8, wherein the polypeptide comprises an alpha/beta hydrolase fold domain having at least 60 percent or greater (e.g., 65, 70, 75, 80, 85, 90, 95, 99, or 100%) sequence identity to residues 35 to 257 of SEQ ID NO: 595.

[0015] In certain embodiments, the HMM score of the amino acid sequence of the polypeptide is greater than about 145, using an HMM generated from the amino acid sequences depicted in FIG. 9, wherein the polypeptide comprises a Rapid Alkalinization Factor (RALF) domain having at least 60 percent or greater (e.g., 65, 70, 75, 80, 85, 90, 95, 99, or 100%) sequence identity to residues 57 to 129 of SEQ ID NO: 77, or RALF domains identified in the sequence listing.

[0016] In certain embodiments, the HMM score of the amino acid sequence of the polypeptide is greater than about 280, using an HMM generated from the amino acid sequences depicted in FIG. 10, wherein the polypeptide comprises a protein of unknown function (DUF640) domain having at least 60 percent or greater (e.g., 65, 70, 75, 80, 85, 90, 95, 99, or 100%) sequence identity to residues 19 to 152 of SEQ ID NO: 209, or DUF640 domains identified in the sequence listing.

[0017] In certain embodiments, the HMM score of the amino acid sequence of the polypeptide is greater than about 1000, using an HMM generated from the amino acid sequences depicted in FIG. 11, wherein the polypeptide comprises a POT family domain having at least 60 percent or greater (e.g., 65, 70, 75, 80, 85, 90, 95, 99, or 100%) sequence identity to residues 100 to 509 of SEQ ID NO: 426, or POT family domains identified in the sequence listing.

[0018] In another aspect, a method comprises introducing into a plant cell an exogenous nucleic acid that comprises a regulatory region operably linked to a nucleotide sequence encoding a polypeptide having 80 percent or greater sequence identity to an amino acid sequence set forth in SEQ ID NO: 1, 2, 4, 6, 8, 10, 11, 12, 13, 14, 15, 16, 17, 18, 20, 22, 24, 25, 27, 29, 30, 32, 33, 34, 36, 37, 38, 39, 40, 41, 43, 45, 47, 49, 50, 51, 53, 54, 56, 58, 59, 61, 63, 64, 66, 68, 70, 71, 72, 74, 75, 77, 79, 81, 82, 84, 86, 87, 88, 90, 92, 94, 96, 98, 100, 102, 104, 106, 108, 110, 112, 114, 115, 117, 118, 120, 121, 122, 123, 125, 127, 129, 131, 132, 133, 135, 137, 139, 141, 142, 144, 145, 146, 147, 149, 151, 152, 153, 154, 155, 156, 158, 160, 162, 163, 164, 166, 168, 169, 171, 173, 174, 176, 178, 180, 182, 184, 185, 186, 188, 189, 190, 191, 193, 194, 195, 196, 198, 200, 202, 203, 204, 206, 207, 209, 210, 212, 214, 216, 218, 220, 222, 224, 226, 228, 230, 232, 234, 236, 238, 239, 241, 242, 243, 244, 245, 246, 247, 248, 249, 250, 251, 253, 255, 257, 259, 261, 263, 264, 266, 268, 269, 271, 273, 275, 276, 278, 279, 281, 282, 283, 285, 287, 289, 291, 292, 294, 295, 296, 297, 298, 299, 300, 302, 304, 305, 306, 308, 310, 311, 312, 314, 315, 317, 319, 320, 321, 323, 324, 326, 327, 329, 331, 332, 334, 336, 337, 338, 340, 342, 343, 345, 347, 349, 351, 353, 354, 356, 357, 359, 361, 363, 365, 367, 369, 371, 372, 374, 376, 378, 380, 382, 384, 386, 388, 390, 391, 393, 395, 397, 399, 401, 403, 405, 406, 407, 409, 411, 413, 415, 416, 417, 418, 420, 421, 422, 424, 426, 428, 429, 430, 431, 433, 435, 436, 437, 438, 439, 440, 442, 444, 446, 447, 448, 449, 450, 452, 453, 454, 455, 456, 457, 459, 461, 463, 464, 466, 467, 468, 470, 472, 474, 476, 478, 479, 480, 482, 483, 484, 486, 488, 490, 492, 493, 495, 497, 499, 500, 501, 502, 503, 504, 506, 508, 509, 511, 513, 515, 516, 517, 518, 519, 521, 523, 525, 526, 528, 529, 531, 532, 534, 536, 537, 539, 540, 541, 543, 545, 547, 549, 550, 551, 552, 554, 556, 558, 560, 562, 563, 565, 567, 569, 571, 573, 574, 575, 577, 579, 581, 583, 585, 587, 589, 591, 593, 595, 597, 598, 600, 602, 603, 604, 605, 606, 608, 609, 610, 611, 613, 615, 616, 618, 619, 620, 622, 623, 625, 627, 629, 630, 632, 633, 634, 636, 637, 638, 639, 641, 642, 643, 645, 647, 649, 651, 652, 653, 655, 657, 659, 660, 662, 664, 666, 667, 669, 670, 671, 672, 673, 674, 675, 676, 677, 689, 691, 693, 695, or 697. A plant produced from the plant cell has a difference in the level of biomass as compared to the corresponding level of biomass of a control plant that does not comprise the exogenous nucleic acid. The polypeptide in any of the above methods can have the amino acid sequence set forth in SEQ ID NO: 1, 2, 4, 6, 8, 10, 11, 12, 13, 14, 15, 16, 17, 18, 20, 22, 24, 25, 27, 29, 30, 32, 33, 34, 36, 37, 38, 39, 40, 41, 43, 45, 47, 49, 50, 51, 53, 54, 56, 58, 59, 61, 63, 64, 66, 68, 70, 71, 72, 74, 75, 77, 79, 81, 82, 84, 86, 87, 88, 90, 92, 94, 96, 98, 100, 102, 104, 106, 108, 110, 112, 114, 115, 117, 118, 120, 121, 122, 123, 125, 127, 129, 131, 132, 133, 135, 137, 139, 141, 142, 144, 145, 146, 147, 149, 151, 152, 153, 154, 155, 156, 158, 160, 162, 163, 164, 166, 168, 169, 171, 173, 174, 176, 178, 180, 182, 184, 185, 186, 188, 189, 190, 191, 193, 194, 195, 196, 198, 200, 202, 203, 204, 206, 207, 209, 210, 212, 214, 216, 218, 220, 222, 224, 226, 228, 230, 232, 234, 236, 238, 239, 241, 242, 243, 244, 245, 246, 247, 248, 249, 250, 251, 253, 255, 257, 259, 261, 263, 264, 266, 268, 269, 271, 273, 275, 276, 278, 279, 281, 282, 283, 285, 287, 289, 291, 292, 294, 295, 296, 297, 298, 299, 300, 302, 304, 305, 306, 308, 310, 311, 312, 314, 315, 317, 319, 320, 321, 323, 324, 326, 327, 329, 331, 332, 334, 336, 337, 338, 340, 342, 343, 345, 347, 349, 351, 353, 354, 356, 357, 359, 361, 363, 365, 367, 369, 371, 372, 374, 376, 378, 380, 382, 384, 386, 388, 390, 391, 393, 395, 397, 399, 401, 403, 405, 406, 407, 409, 411, 413, 415, 416, 417, 418, 420, 421, 422, 424, 426, 428, 429, 430, 431, 433, 435, 436, 437, 438, 439, 440, 442, 444, 446, 447, 448, 449, 450, 452, 453, 454, 455, 456, 457, 459, 461, 463, 464, 466, 467, 468, 470, 472, 474, 476, 478, 479, 480, 482, 483, 484, 486, 488, 490, 492, 493, 495, 497, 499, 500, 501, 502, 503, 504, 506, 508, 509, 511, 513, 515, 516, 517, 518, 519, 521, 523, 525, 526, 528, 529, 531, 532, 534, 536, 537, 539, 540, 541, 543, 545, 547, 549, 550, 551, 552, 554, 556, 558, 560, 562, 563, 565, 567, 569, 571, 573, 574, 575, 577, 579, 581, 583, 585, 587, 589, 591, 593, 595, 597, 598, 600, 602, 603, 604, 605, 606, 608, 609, 610, 611, 613, 615, 616, 618, 619, 620, 622, 623, 625, 627, 629, 630, 632, 633, 634, 636, 637, 638, 639, 641, 642, 643, 645, 647, 649, 651, 652, 653, 655, 657, 659, 660, 662, 664, 666, 667, 669, 670, 671, 672, 673, 674, 675, 676, 677, 689, 691, 693, 695, or 697.

[0019] In another aspect, a method comprises introducing into a plant cell an exogenous nucleic acid, that comprises a regulatory region operably linked to a nucleotide sequence having 80 percent or greater sequence identity to a nucleotide sequence set forth in SEQ ID NO: 3, 5, 7, 9, 19, 21, 23, 26, 28, 31, 35, 42, 44, 46, 48, 52, 55, 57, 60, 62, 65, 67, 69, 73, 76, 78, 80, 83, 85, 89, 91, 93, 95, 97, 99, 101, 103, 105, 107, 109, 111, 113, 116, 119, 124, 126, 128, 130, 134, 136, 138, 140, 143, 148, 150, 157, 159, 161, 165, 167, 170, 172, 175, 177, 179, 181, 183, 187, 192, 197, 199, 201, 205, 208, 211, 213, 215, 217, 219, 221, 223, 225, 227, 229, 231, 233, 235, 237, 240, 252, 254, 256, 258, 260, 262, 265, 267, 270, 272, 274, 277, 280, 284, 286, 288, 290, 293, 301, 303, 307, 309, 313, 316, 318, 322, 325, 328, 330, 333, 335, 339, 341, 344, 346, 348, 350, 352, 355, 358, 360, 362, 364, 366, 368, 370, 373, 375, 377, 379, 381, 383, 385, 387, 389, 392, 394, 396, 398, 400, 402, 404, 408, 410, 412, 414, 419, 423, 425, 427, 432, 434, 441, 443, 445, 451, 458, 460, 462, 465, 469, 471, 473, 475, 477, 481, 485, 487, 489, 491, 494, 496, 498, 505, 507, 510, 512, 514, 520, 522, 524, 527, 530, 533, 535, 538, 542, 544, 546, 548, 553, 555, 557, 559, 561, 564, 566, 568, 570, 572, 576, 578, 580, 582, 584, 586, 588, 590, 592, 594, 596, 599, 601, 607, 612, 614, 617, 621, 624, 626, 628, 631, 635, 640, 644, 646, 648, 650, 654, 656, 658, 661, 663, 665, 668, 678, 679, 680, 681, 682, 683, 684, 685, 686, 687, 688, 690, 692, 694, or 696, or a fragment thereof. A plant produced from the plant cell has a difference in the level of biomass as compared to the corresponding level of biomass of a control plant that does not comprise the exogenous nucleic acid.

[0020] Plant cells comprising an exogenous nucleic acid are provided herein. In one aspect, the exogenous nucleic acid comprises a regulatory region operably linked to a nucleotide sequence encoding a polypeptide. The HMM bit score of the amino acid sequence of the polypeptide is greater than about 130, 340, 530, 120, 635, 65, 100, 480, 145, 280, or 1000, using an HMM based on the amino acid sequences depicted in one of FIG. 1, 2, 3, 4, 5, 6, 7, 8, 9, 10, or 11. The plant has a difference in the level of biomass as compared to the corresponding level of biomass of a control plant that does not comprise the exogenous nucleic acid. In another aspect, the exogenous nucleic acid comprises a regulatory region operably linked to a nucleotide sequence encoding a polypeptide having 80 percent or greater sequence identity to an amino acid sequence selected from the group consisting of SEQ ID NO: 1, 2, 4, 6, 8, 10, 11, 12, 13, 14, 15, 16, 17, 18, 20, 22, 24, 25, 27, 29, 30, 32, 33, 34, 36, 37, 38, 39, 40, 41, 43, 45, 47, 49, 50, 51, 53, 54, 56, 58, 59, 61, 63, 64, 66, 68, 70, 71, 72, 74, 75, 77, 79, 81, 82, 84, 86, 87, 88, 90, 92, 94, 96, 98, 100, 102, 104, 106, 108, 110, 112, 114, 115, 117, 118, 120, 121, 122, 123, 125, 127, 129, 131, 132, 133, 135, 137, 139, 141, 142, 144, 145, 146, 147, 149, 151, 152, 153, 154, 155, 156, 158, 160, 162, 163, 164, 166, 168, 169, 171, 173, 174, 176, 178, 180, 182, 184, 185, 186, 188, 189, 190, 191, 193, 194, 195, 196, 198, 200, 202, 203, 204, 206, 207, 209, 210, 212, 214, 216, 218, 220, 222, 224, 226, 228, 230, 232, 234, 236, 238, 239, 241, 242, 243, 244, 245, 246, 247, 248, 249, 250, 251, 253, 255, 257, 259, 261, 263, 264, 266, 268, 269, 271, 273, 275, 276, 278, 279, 281, 282, 283, 285, 287, 289, 291, 292, 294, 295, 296, 297, 298, 299, 300, 302, 304, 305, 306, 308, 310, 311, 312, 314, 315, 317, 319, 320, 321, 323, 324, 326, 327, 329, 331, 332, 334, 336, 337, 338, 340, 342, 343, 345, 347, 349, 351, 353, 354, 356, 357, 359, 361, 363, 365, 367, 369, 371, 372, 374, 376, 378, 380, 382, 384, 386, 388, 390, 391, 393, 395, 397, 399, 401, 403, 405, 406, 407, 409, 411, 413, 415, 416, 417, 418, 420, 421, 422, 424, 426, 428, 429, 430, 431, 433, 435, 436, 437, 438, 439, 440, 442, 444, 446, 447, 448, 449, 450, 452, 453, 454, 455, 456, 457, 459, 461, 463, 464, 466, 467, 468, 470, 472, 474, 476, 478, 479, 480, 482, 483, 484, 486, 488, 490, 492, 493, 495, 497, 499, 500, 501, 502, 503, 504, 506, 508, 509, 511, 513, 515, 516, 517, 518, 519, 521, 523, 525, 526, 528, 529, 531, 532, 534, 536, 537, 539, 540, 541, 543, 545, 547, 549, 550, 551, 552, 554, 556, 558, 560, 562, 563, 565, 567, 569, 571, 573, 574, 575, 577, 579, 581, 583, 585, 587, 589, 591, 593, 595, 597, 598, 600, 602, 603, 604, 605, 606, 608, 609, 610, 611, 613, 615, 616, 618, 619, 620, 622, 623, 625, 627, 629, 630, 632, 633, 634, 636, 637, 638, 639, 641, 642, 643, 645, 647, 649, 651, 652, 653, 655, 657, 659, 660, 662, 664, 666, 667, 669, 670, 671, 672, 673, 674, 675, 676, 677, 689, 691, 693, 695, or 697. A plant produced from the plant cell has a difference in the level of biomass as compared to the corresponding level of biomass of a control plant that does not comprise the exogenous nucleic acid. In another aspect, the exogenous nucleic acid comprises a regulatory region operably linked to a nucleotide sequence having 80 percent or greater sequence identity to a nucleotide sequence selected from the group consisting of SEQ ID NO: 3, 5, 7, 9, 19, 21, 23, 26, 28, 31, 35, 42, 44, 46, 48, 52, 55, 57, 60, 62, 65, 67, 69, 73, 76, 78, 80, 83, 85, 89, 91, 93, 95, 97, 99, 101, 103, 105, 107, 109, 111, 113, 116, 119, 124, 126, 128, 130, 134, 136, 138, 140, 143, 148, 150, 157, 159, 161, 165, 167, 170, 172, 175, 177, 179, 181, 183, 187, 192, 197, 199, 201, 205, 208, 211, 213, 215, 217, 219, 221, 223, 225, 227, 229, 231, 233, 235, 237, 240, 252, 254, 256, 258, 260, 262, 265, 267, 270, 272, 274, 277, 280, 284, 286, 288, 290, 293, 301, 303, 307, 309, 313, 316, 318, 322, 325, 328, 330, 333, 335, 339, 341, 344, 346, 348, 350, 352, 355, 358, 360, 362, 364, 366, 368, 370, 373, 375, 377, 379, 381, 383, 385, 387, 389, 392, 394, 396, 398, 400, 402, 404, 408, 410, 412, 414, 419, 423, 425, 427, 432, 434, 441, 443, 445, 451, 458, 460, 462, 465, 469, 471, 473, 475, 477, 481, 485, 487, 489, 491, 494, 496, 498, 505, 507, 510, 512, 514, 520, 522, 524, 527, 530, 533, 535, 538, 542, 544, 546, 548, 553, 555, 557, 559, 561, 564, 566, 568, 570, 572, 576, 578, 580, 582, 584, 586, 588, 590, 592, 594, 596, 599, 601, 607, 612, 614, 617, 621, 624, 626, 628, 631, 635, 640, 644, 646, 648, 650, 654, 656, 658, 661, 663, 665, 668, 678, 679, 680, 681, 682, 683, 684, 685, 686, 687, 688, 690, 692, 694, or 696, or a fragment thereof. A plant produced from the plant cell has a difference in the level of biomass as compared to the corresponding level of biomass of a control plant that does not comprise the exogenous nucleic acid. A transgenic plant comprising such a plant cell is also provided. Also provided is a plant biomass or seed product. The product comprises vegetative or embryonic tissue from a transgenic plant described herein.

[0021] Isolated nucleic acids are also provided. In one aspect, an isolated nucleic acid comprises a nucleotide sequence having 80% or greater sequence identity to the nucleotide sequence set forth in SEQ ID NO: 3, 5, 7, 9, 19, 21, 23, 26, 28, 31, 35, 42, 44, 46, 48, 52, 55, 57, 60, 62, 65, 67, 69, 73, 76, 78, 80, 83, 85, 89, 91, 93, 95, 97, 99, 101, 103, 105, 107, 109, 111, 113, 116, 119, 124, 126, 128, 130, 134, 136, 138, 140, 143, 148, 150, 157, 159, 161, 165, 167, 170, 172, 175, 177, 179, 181, 183, 187, 192, 197, 199, 201, 205, 208, 211, 213, 215, 217, 219, 221, 223, 225, 227, 229, 231, 233, 235, 237, 240, 252, 254, 256, 258, 260, 262, 265, 267, 270, 272, 274, 277, 280, 284, 286, 288, 290, 293, 301, 303, 307, 309, 313, 316, 318, 322, 325, 328, 330, 333, 335, 339, 341, 344, 346, 348, 350, 352, 355, 358, 360, 362, 364, 366, 368, 370, 373, 375, 377, 379, 381, 383, 385, 387, 389, 392, 394, 396, 398, 400, 402, 404, 408, 410, 412, 414, 419, 423, 425, 427, 432, 434, 441, 443, 445, 451, 458, 460, 462, 465, 469, 471, 473, 475, 477, 481, 485, 487, 489, 491, 494, 496, 498, 505, 507, 510, 512, 514, 520, 522, 524, 527, 530, 533, 535, 538, 542, 544, 546, 548, 553, 555, 557, 559, 561, 564, 566, 568, 570, 572, 576, 578, 580, 582, 584, 586, 588, 590, 592, 594, 596, 599, 601, 607, 612, 614, 617, 621, 624, 626, 628, 631, 635, 640, 644, 646, 648, 650, 654, 656, 658, 661, 663, 665, 668, 678, 679, 680, 681, 682, 683, 684, 685, 686, 687, 688, 690, 692, 694, or 696. In another aspect, an isolated nucleic acid comprises a nucleotide sequence encoding a polypeptide having 80% or greater sequence identity to the amino acid sequence set forth in SEQ ID NO: 1, 2, 4, 6, 8, 10, 11, 12, 13, 14, 15, 16, 17, 18, 20, 22, 24, 25, 27, 29, 30, 32, 33, 34, 36, 37, 38, 39, 40, 41, 43, 45, 47, 49, 50, 51, 53, 54, 56, 58, 59, 61, 63, 64, 66, 68, 70, 71, 72, 74, 75, 77, 79, 81, 82, 84, 86, 87, 88, 90, 92, 94, 96, 98, 100, 102, 104, 106, 108, 110, 112, 114, 115, 117, 118, 120, 121, 122, 123, 125, 127, 129, 131, 132, 133, 135, 137, 139, 141, 142, 144, 145, 146, 147, 149, 151, 152, 153, 154, 155, 156, 158, 160, 162, 163, 164, 166, 168, 169, 171, 173, 174, 176, 178, 180, 182, 184, 185, 186, 188, 189, 190, 191, 193, 194, 195, 196, 198, 200, 202, 203, 204, 206, 207, 209, 210, 212, 214, 216, 218, 220, 222, 224, 226, 228, 230, 232, 234, 236, 238, 239, 241, 242, 243, 244, 245, 246, 247, 248, 249, 250, 251, 253, 255, 257, 259, 261, 263, 264, 266, 268, 269, 271, 273, 275, 276, 278, 279, 281, 282, 283, 285, 287, 289, 291, 292, 294, 295, 296, 297, 298, 299, 300, 302, 304, 305, 306, 308, 310, 311, 312, 314, 315, 317, 319, 320, 321, 323, 324, 326, 327, 329, 331, 332, 334, 336, 337, 338, 340, 342, 343, 345, 347, 349, 351, 353, 354, 356, 357, 359, 361, 363, 365, 367, 369, 371, 372, 374, 376, 378, 380, 382, 384, 386, 388, 390, 391, 393, 395, 397, 399, 401, 403, 405, 406, 407, 409, 411, 413, 415, 416, 417, 418, 420, 421, 422, 424, 426, 428, 429, 430, 431, 433, 435, 436, 437, 438, 439, 440, 442, 444, 446, 447, 448, 449, 450, 452, 453, 454, 455, 456, 457, 459, 461, 463, 464, 466, 467, 468, 470, 472, 474, 476, 478, 479, 480, 482, 483, 484, 486, 488, 490, 492, 493, 495, 497, 499, 500, 501, 502, 503, 504, 506, 508, 509, 511, 513, 515, 516, 517, 518, 519, 521, 523, 525, 526, 528, 529, 531, 532, 534, 536, 537, 539, 540, 541, 543, 545, 547, 549, 550, 551, 552, 554, 556, 558, 560, 562, 563, 565, 567, 569, 571, 573, 574, 575, 577, 579, 581, 583, 585, 587, 589, 591, 593, 595, 597, 598, 600, 602, 603, 604, 605, 606, 608, 609, 610, 611, 613, 615, 616, 618, 619, 620, 622, 623, 625, 627, 629, 630, 632, 633, 634, 636, 637, 638, 639, 641, 642, 643, 645, 647, 649, 651, 652, 653, 655, 657, 659, 660, 662, 664, 666, 667, 669, 670, 671, 672, 673, 674, 675, 676, 677, 689, 691, 693, 695, or 697.

[0022] In another aspect, methods of identifying a genetic polymorphism associated with variation in the level of biomass are provided. The methods include providing a population of plants, and determining whether one or more genetic polymorphisms in the population are genetically linked to the locus for a polypeptide selected from the group consisting of the polypeptides depicted in FIGS. 1-11 and functional homologs thereof. The correlation between variation in the level of biomass in a tissue in plants of the population and the presence of the one or more genetic polymorphisms in plants of the population is measured, thereby permitting identification of whether or not the one or more genetic polymorphisms are associated with such variation.

[0023] In another aspect, methods of making a plant line are provided. The methods include determining whether one or more genetic polymorphisms in a population of plants is associated with the locus for one or more of the polypeptides depicted in FIGS. 1-11 and functional homologs of such polypeptides. One or more plants in the population is identified in which the presence of at least one of the genetic polymorphism(s) is associated with variation in a biomass trait. The above-described steps can be performed in either order. One or more of the identified plants is then crossed with itself or a different plant to produce seed, and at least one progeny plant grown from such seed is crossed with itself or a different plant. The steps of selfing and outcrossing are repeated for an additional 0-5 generations to make a plant line in which the at least one polymorphism is present. The biomass trait can be yield of dry matter, and the plant population can be switchgrass plants.

[0024] This document also features a method of altering the level of biomass in a plant. The method includes modifying an endogenous biomass-modulating nucleic acid, the nucleic acid including a nucleotide sequence with an open reading frame having 80 percent or greater sequence identity to the nucleotide sequence selected from the group consisting of SEQ ID NO: 3, 5, 7, 9, 19, 21, 23, 26, 28, 31, 35, 42, 44, 46, 48, 52, 55, 57, 60, 62, 65, 67, 69, 73, 76, 78, 80, 83, 85, 89, 91, 93, 95, 97, 99, 101, 103, 105, 107, 109, 111, 113, 116, 119, 124, 126, 128, 130, 134, 136, 138, 140, 143, 148, 150, 157, 159, 161, 165, 167, 170, 172, 175, 177, 179, 181, 183, 187, 192, 197, 199, 201, 205, 208, 211, 213, 215, 217, 219, 221, 223, 225, 227, 229, 231, 233, 235, 237, 240, 252, 254, 256, 258, 260, 262, 265, 267, 270, 272, 274, 277, 280, 284, 286, 288, 290, 293, 301, 303, 307, 309, 313, 316, 318, 322, 325, 328, 330, 333, 335, 339, 341, 344, 346, 348, 350, 352, 355, 358, 360, 362, 364, 366, 368, 370, 373, 375, 377, 379, 381, 383, 385, 387, 389, 392, 394, 396, 398, 400, 402, 404, 408, 410, 412, 414, 419, 423, 425, 427, 432, 434, 441, 443, 445, 451, 458, 460, 462, 465, 469, 471, 473, 475, 477, 481, 485, 487, 489, 491, 494, 496, 498, 505, 507, 510, 512, 514, 520, 522, 524, 527, 530, 533, 535, 538, 542, 544, 546, 548, 553, 555, 557, 559, 561, 564, 566, 568, 570, 572, 576, 578, 580, 582, 584, 586, 588, 590, 592, 594, 596, 599, 601, 607, 612, 614, 617, 621, 624, 626, 628, 631, 635, 640, 644, 646, 648, 650, 654, 656, 658, 661, 663, 665, 668, 678, 679, 680, 681, 682, 683, 684, 685, 686, 687, 688, 690, 692, 694, and 696. The plant has a difference in the level of biomass as compared to the corresponding level of a control plant where the nucleic acid has not been modified. The modification can be effected by introducing a genetic modification in the locus comprising the nucleic acid. The method further can include selecting for plants having altered biomass.

[0025] In some embodiments, the endogenous nucleic acid encodes a polypeptide having 80 percent or greater sequence identity to an amino acid sequence selected from the group consisting of SEQ ID NO: 1, 2, 4, 6, 8, 10, 11, 12, 13, 14, 15, 16, 17, 18, 20, 22, 24, 25, 27, 29, 30, 32, 33, 34, 36, 37, 38, 39, 40, 41, 43, 45, 47, 49, 50, 51, 53, 54, 56, 58, 59, 61, 63, 64, 66, 68, 70, 71, 72, 74, 75, 77, 79, 81, 82, 84, 86, 87, 88, 90, 92, 94, 96, 98, 100, 102, 104, 106, 108, 110, 112, 114, 115, 117, 118, 120, 121, 122, 123, 125, 127, 129, 131, 132, 133, 135, 137, 139, 141, 142, 144, 145, 146, 147, 149, 151, 152, 153, 154, 155, 156, 158, 160, 162, 163, 164, 166, 168, 169, 171, 173, 174, 176, 178, 180, 182, 184, 185, 186, 188, 189, 190, 191, 193, 194, 195, 196, 198, 200, 202, 203, 204, 206, 207, 209, 210, 212, 214, 216, 218, 220, 222, 224, 226, 228, 230, 232, 234, 236, 238, 239, 241, 242, 243, 244, 245, 246, 247, 248, 249, 250, 251, 253, 255, 257, 259, 261, 263, 264, 266, 268, 269, 271, 273, 275, 276, 278, 279, 281, 282, 283, 285, 287, 289, 291, 292, 294, 295, 296, 297, 298, 299, 300, 302, 304, 305, 306, 308, 310, 311, 312, 314, 315, 317, 319, 320, 321, 323, 324, 326, 327, 329, 331, 332, 334, 336, 337, 338, 340, 342, 343, 345, 347, 349, 351, 353, 354, 356, 357, 359, 361, 363, 365, 367, 369, 371, 372, 374, 376, 378, 380, 382, 384, 386, 388, 390, 391, 393, 395, 397, 399, 401, 403, 405, 406, 407, 409, 411, 413, 415, 416, 417, 418, 420, 421, 422, 424, 426, 428, 429, 430, 431, 433, 435, 436, 437, 438, 439, 440, 442, 444, 446, 447, 448, 449, 450, 452, 453, 454, 455, 456, 457, 459, 461, 463, 464, 466, 467, 468, 470, 472, 474, 476, 478, 479, 480, 482, 483, 484, 486, 488, 490, 492, 493, 495, 497, 499, 500, 501, 502, 503, 504, 506, 508, 509, 511, 513, 515, 516, 517, 518, 519, 521, 523, 525, 526, 528, 529, 531, 532, 534, 536, 537, 539, 540, 541, 543, 545, 547, 549, 550, 551, 552, 554, 556, 558, 560, 562, 563, 565, 567, 569, 571, 573, 574, 575, 577, 579, 581, 583, 585, 587, 589, 591, 593, 595, 597, 598, 600, 602, 603, 604, 605, 606, 608, 609, 610, 611, 613, 615, 616, 618, 619, 620, 622, 623, 625, 627, 629, 630, 632, 633, 634, 636, 637, 638, 639, 641, 642, 643, 645, 647, 649, 651, 652, 653, 655, 657, 659, 660, 662, 664, 666, 667, 669, 670, 671, 672, 673, 674, 675, 676, 677, 689, 691, 693, 695, and 697.

[0026] In some embodiments, the endogenous nucleic acid comprises a nucleotide sequence with an open reading frame having 90 percent or greater sequence identity to the nucleotide sequence selected from the group consisting of SEQ ID NO: 3, 5, 7, 9, 19, 21, 23, 26, 28, 31, 35, 42, 44, 46, 48, 52, 55, 57, 60, 62, 65, 67, 69, 73, 76, 78, 80, 83, 85, 89, 91, 93, 95, 97, 99, 101, 103, 105, 107, 109, 111, 113, 116, 119, 124, 126, 128, 130, 134, 136, 138, 140, 143, 148, 150, 157, 159, 161, 165, 167, 170, 172, 175, 177, 179, 181, 183, 187, 192, 197, 199, 201, 205, 208, 211, 213, 215, 217, 219, 221, 223, 225, 227, 229, 231, 233, 235, 237, 240, 252, 254, 256, 258, 260, 262, 265, 267, 270, 272, 274, 277, 280, 284, 286, 288, 290, 293, 301, 303, 307, 309, 313, 316, 318, 322, 325, 328, 330, 333, 335, 339, 341, 344, 346, 348, 350, 352, 355, 358, 360, 362, 364, 366, 368, 370, 373, 375, 377, 379, 381, 383, 385, 387, 389, 392, 394, 396, 398, 400, 402, 404, 408, 410, 412, 414, 419, 423, 425, 427, 432, 434, 441, 443, 445, 451, 458, 460, 462, 465, 469, 471, 473, 475, 477, 481, 485, 487, 489, 491, 494, 496, 498, 505, 507, 510, 512, 514, 520, 522, 524, 527, 530, 533, 535, 538, 542, 544, 546, 548, 553, 555, 557, 559, 561, 564, 566, 568, 570, 572, 576, 578, 580, 582, 584, 586, 588, 590, 592, 594, 596, 599, 601, 607, 612, 614, 617, 621, 624, 626, 628, 631, 635, 640, 644, 646, 648, 650, 654, 656, 658, 661, 663, 665, 668, 678, 679, 680, 681, 682, 683, 684, 685, 686, 687, 688, 690, 692, 694, and 696.

[0027] In some embodiments, the endogenous nucleic acid comprises a nucleotide sequence with an open reading frame having 95 percent or greater sequence identity to the nucleotide sequence selected from the group consisting of SEQ ID NO: 3, 5, 7, 9, 19, 21, 23, 26, 28, 31, 35, 42, 44, 46, 48, 52, 55, 57, 60, 62, 65, 67, 69, 73, 76, 78, 80, 83, 85, 89, 91, 93, 95, 97, 99, 101, 103, 105, 107, 109, 111, 113, 116, 119, 124, 126, 128, 130, 134, 136, 138, 140, 143, 148, 150, 157, 159, 161, 165, 167, 170, 172, 175, 177, 179, 181, 183, 187, 192, 197, 199, 201, 205, 208, 211, 213, 215, 217, 219, 221, 223, 225, 227, 229, 231, 233, 235, 237, 240, 252, 254, 256, 258, 260, 262, 265, 267, 270, 272, 274, 277, 280, 284, 286, 288, 290, 293, 301, 303, 307, 309, 313, 316, 318, 322, 325, 328, 330, 333, 335, 339, 341, 344, 346, 348, 350, 352, 355, 358, 360, 362, 364, 366, 368, 370, 373, 375, 377, 379, 381, 383, 385, 387, 389, 392, 394, 396, 398, 400, 402, 404, 408, 410, 412, 414, 419, 423, 425, 427, 432, 434, 441, 443, 445, 451, 458, 460, 462, 465, 469, 471, 473, 475, 477, 481, 485, 487, 489, 491, 494, 496, 498, 505, 507, 510, 512, 514, 520, 522, 524, 527, 530, 533, 535, 538, 542, 544, 546, 548, 553, 555, 557, 559, 561, 564, 566, 568, 570, 572, 576, 578, 580, 582, 584, 586, 588, 590, 592, 594, 596, 599, 601, 607, 612, 614, 617, 621, 624, 626, 628, 631, 635, 640, 644, 646, 648, 650, 654, 656, 658, 661, 663, 665, 668, 678, 679, 680, 681, 682, 683, 684, 685, 686, 687, 688, 690, 692, 694, and 696.

[0028] This document also features a method of producing a plant. The method includes growing a plant cell containing a modified endogenous nucleic acid encoding a polypeptide, wherein the HMM bit score of the amino acid sequence of the polypeptide is greater than about 65, the HMM based on the amino acid sequences depicted in one of FIGS. 1-11, and wherein the plant has a difference in the level of biomass as compared to the corresponding level of a control plant where the nucleic acid has not been modified.

[0029] In another aspect, this document features a plant cell containing a modified endogenous nucleic acid encoding a polypeptide, wherein the HMM bit score of the amino acid sequence of the polypeptide is greater than about 65, the HMM based on the amino acid sequences depicted in one of FIGS. 1-11, and wherein a plant produced from the plant cell has a difference in the level of biomass as compared to the corresponding level of a control plant where the nucleic acid has not been modified.

[0030] This document also features a plant cell containing a modified biomass-modulating endogenous nucleic acid. The nucleic acid comprising a nucleotide sequence with an open reading frame having 80 percent or greater sequence identity to the nucleotide sequence selected from the group consisting of SEQ ID NO: 3, 5, 7, 9, 19, 21, 23, 26, 28, 31, 35, 42, 44, 46, 48, 52, 55, 57, 60, 62, 65, 67, 69, 73, 76, 78, 80, 83, 85, 89, 91, 93, 95, 97, 99, 101, 103, 105, 107, 109, 111, 113, 116, 119, 124, 126, 128, 130, 134, 136, 138, 140, 143, 148, 150, 157, 159, 161, 165, 167, 170, 172, 175, 177, 179, 181, 183, 187, 192, 197, 199, 201, 205, 208, 211, 213, 215, 217, 219, 221, 223, 225, 227, 229, 231, 233, 235, 237, 240, 252, 254, 256, 258, 260, 262, 265, 267, 270, 272, 274, 277, 280, 284, 286, 288, 290, 293, 301, 303, 307, 309, 313, 316, 318, 322, 325, 328, 330, 333, 335, 339, 341, 344, 346, 348, 350, 352, 355, 358, 360, 362, 364, 366, 368, 370, 373, 375, 377, 379, 381, 383, 385, 387, 389, 392, 394, 396, 398, 400, 402, 404, 408, 410, 412, 414, 419, 423, 425, 427, 432, 434, 441, 443, 445, 451, 458, 460, 462, 465, 469, 471, 473, 475, 477, 481, 485, 487, 489, 491, 494, 496, 498, 505, 507, 510, 512, 514, 520, 522, 524, 527, 530, 533, 535, 538, 542, 544, 546, 548, 553, 555, 557, 559, 561, 564, 566, 568, 570, 572, 576, 578, 580, 582, 584, 586, 588, 590, 592, 594, 596, 599, 601, 607, 612, 614, 617, 621, 624, 626, 628, 631, 635, 640, 644, 646, 648, 650, 654, 656, 658, 661, 663, 665, 668, 678, 679, 680, 681, 682, 683, 684, 685, 686, 687, 688, 690, 692, 694, and 696. A plant produced from the plant cell has a difference in the level of biomass as compared to the corresponding level of a control plant where the nucleic acid has not been modified.

[0031] In a plant cell described herein, the endogenous nucleic acid can encode a polypeptide having 80 percent or greater sequence identity to an amino acid sequence selected from the group consisting of SEQ ID NO: 1, 2, 4, 6, 8, 10, 11, 12, 13, 14, 15, 16, 17, 18, 20, 22, 24, 25, 27, 29, 30, 32, 33, 34, 36, 37, 38, 39, 40, 41, 43, 45, 47, 49, 50, 51, 53, 54, 56, 58, 59, 61, 63, 64, 66, 68, 70, 71, 72, 74, 75, 77, 79, 81, 82, 84, 86, 87, 88, 90, 92, 94, 96, 98, 100, 102, 104, 106, 108, 110, 112, 114, 115, 117, 118, 120, 121, 122, 123, 125, 127, 129, 131, 132, 133, 135, 137, 139, 141, 142, 144, 145, 146, 147, 149, 151, 152, 153, 154, 155, 156, 158, 160, 162, 163, 164, 166, 168, 169, 171, 173, 174, 176, 178, 180, 182, 184, 185, 186, 188, 189, 190, 191, 193, 194, 195, 196, 198, 200, 202, 203, 204, 206, 207, 209, 210, 212, 214, 216, 218, 220, 222, 224, 226, 228, 230, 232, 234, 236, 238, 239, 241, 242, 243, 244, 245, 246, 247, 248, 249, 250, 251, 253, 255, 257, 259, 261, 263, 264, 266, 268, 269, 271, 273, 275, 276, 278, 279, 281, 282, 283, 285, 287, 289, 291, 292, 294, 295, 296, 297, 298, 299, 300, 302, 304, 305, 306, 308, 310, 311, 312, 314, 315, 317, 319, 320, 321, 323, 324, 326, 327, 329, 331, 332, 334, 336, 337, 338, 340, 342, 343, 345, 347, 349, 351, 353, 354, 356, 357, 359, 361, 363, 365, 367, 369, 371, 372, 374, 376, 378, 380, 382, 384, 386, 388, 390, 391, 393, 395, 397, 399, 401, 403, 405, 406, 407, 409, 411, 413, 415, 416, 417, 418, 420, 421, 422, 424, 426, 428, 429, 430, 431, 433, 435, 436, 437, 438, 439, 440, 442, 444, 446, 447, 448, 449, 450, 452, 453, 454, 455, 456, 457, 459, 461, 463, 464, 466, 467, 468, 470, 472, 474, 476, 478, 479, 480, 482, 483, 484, 486, 488, 490, 492, 493, 495, 497, 499, 500, 501, 502, 503, 504, 506, 508, 509, 511, 513, 515, 516, 517, 518, 519, 521, 523, 525, 526, 528, 529, 531, 532, 534, 536, 537, 539, 540, 541, 543, 545, 547, 549, 550, 551, 552, 554, 556, 558, 560, 562, 563, 565, 567, 569, 571, 573, 574, 575, 577, 579, 581, 583, 585, 587, 589, 591, 593, 595, 597, 598, 600, 602, 603, 604, 605, 606, 608, 609, 610, 611, 613, 615, 616, 618, 619, 620, 622, 623, 625, 627, 629, 630, 632, 633, 634, 636, 637, 638, 639, 641, 642, 643, 645, 647, 649, 651, 652, 653, 655, 657, 659, 660, 662, 664, 666, 667, 669, 670, 671, 672, 673, 674, 675, 676, 677, 689, 691, 693, 695, and 697, and wherein a plant produced from the plant cell has a difference in the level of biomass as compared to the corresponding level of a control plant where the nucleic acid has not been modified.

[0032] In another aspect, this document features a method of modulating the level of biomass in a plant. The method includes introducing into a plant cell an exogenous nucleic acid, the exogenous nucleic acid encoding a polypeptide having E.C. 2.6.1.83 activity.

[0033] A plant cell also is featured that includes an exogenous nucleic acid, where the exogenous nucleic acid encodes a polypeptide having E.C. 2.6.1.83 activity, and wherein a plant produced from the plant cell has a difference in the level of biomass as compared to the corresponding level of a control plant that does not comprise the nucleic acid.

[0034] Unless otherwise defined, all technical and scientific terms used herein have the same meaning as commonly understood by one of ordinary skill in the art to which this invention pertains. Although methods and materials similar or equivalent to those described herein can be used to practice the invention, suitable methods and materials are described below. All publications, patent applications, patents, and other references mentioned herein are incorporated by reference in their entirety. In case of conflict, the present specification, including definitions, will control. In addition, the materials, methods, and examples are illustrative only and not intended to be limiting.

[0035] The details of one or more embodiments of the invention are set forth in the accompanying drawings and the description below. Other features, objects, and advantages of the invention will be apparent from the description and drawings, and from the claims. The word “comprising” in the claims may be replaced by “consisting essentially of” or with “consisting of,” according to standard practice in patent law.

### DESCRIPTION OF THE DRAWINGS

[0036] FIG. 1 is an alignment of the amino acid sequence of CW00733 corresponding to Ceres Clone: 1384304 (SEQ ID NO: 554) with homologous and/or orthologous amino acid sequences. In all the alignment figures shown herein, a dash in an aligned sequence represents a gap, i.e., a lack of an amino acid at that position. Identical amino acids or conserved amino acid substitutions among aligned sequences are identified by boxes. FIG. 1 and the other alignment figures provided herein were generated using the program MUSCLE version 3.52.

[0037] FIG. 2 is an alignment of the amino acid sequence of CW00319 corresponding to Ceres Annot: 544549 (SEQ ID NO: 263) with homologous and/or orthologous amino acid sequences.

[0038] FIG. 3 is an alignment of the amino acid sequence of CW00710 corresponding to Ceres Annot: 1355066 (SEQ ID NO: 117) with homologous and/or orthologous amino acid sequences.

[0039] FIG. 4 is an alignment of the amino acid sequence of CW00628 corresponding to an antisense sequence of Os01g58420, (SEQ ID NO: 1) with homologous and/or orthologous amino acid sequences.

[0040] FIG. 5 is an alignment of the amino acid sequence of CW00297 corresponding to Ceres Clone: 625057 (SEQ ID NO: 645) with homologous and/or orthologous amino acid sequences.

[0041] FIG. 6 is an alignment of the amino acid sequence of CW00604 corresponding to Ceres Clone:1356785 (SEQ ID NO: 253) with homologous and/or orthologous amino acid sequences.

[0042] FIG. 7 is an alignment of the amino acid sequence of CW00564 corresponding to Ceres Clone:638126 (SEQ ID NO: 323) with homologous and/or orthologous amino acid sequences.

[0043] FIG. 8 is an alignment of the amino acid sequence of CW00010 corresponding to Ceres Clone: 26006 (SEQ ID NO: 595) with homologous and/or orthologous amino acid sequences.

[0044] FIG. 9 is an alignment of the amino acid sequence of CW00469 corresponding to Ceres Clone: 4831 (SEQ ID NO: 77) with homologous and/or orthologous amino acid sequences.

[0045] FIG. 10 is an alignment of the amino acid sequence of CW00536 corresponding to Ceres Annot: 847799 (SEQ ID NO:209) with homologous and/or orthologous amino acid sequences.

[0046] FIG. 11 is an alignment of the amino acid sequence of CW00191 corresponding to Ceres Annot: 878355 (SEQ ID NO: 426) with homologous and/or orthologous amino acid sequences.

### DETAILED DESCRIPTION

[0047] The invention features methods and materials related to modulating biomass levels in plants. In some embodiments, the plants may also have modulated levels of, for example, lignin, modified root architecture, modified herbicide resistance, modified carotenoid biosynthesis, or modulated cell wall content. The methods can include transforming a plant cell with a nucleic acid encoding a biomass-modulating polypeptide, wherein expression of the polypeptide results in a modulated level of biomass. Plant cells produced using such methods can be grown to produce plants having an increased or decreased biomass. Such plants, and the seeds of such plants, may be used to produce, for example, biomass having an increased value as a biofuel feedstock.

### I. DEFINITIONS

[0048] “Amino acid” refers to one of the twenty biologically occurring amino acids and to synthetic amino acids, including D/L optical isomers.

[0049] “Cell type-preferential promoter” or “tissue-preferential promoter” refers to a promoter that drives expression preferentially in a target cell type or tissue, respectively, but may also lead to some transcription in other cell types or tissues as well.

[0050] “Control plant” refers to a plant that does not contain the exogenous nucleic acid present in a transgenic plant of interest, but otherwise has the same or similar genetic background as such a transgenic plant. A suitable control plant can be a non-transgenic wild type plant, a non-transgenic segregant from a transformation experiment, or a transgenic plant that contains an exogenous nucleic acid other than the exogenous nucleic acid of interest.

[0051] “Domains” are groups of substantially contiguous amino acids in a polypeptide that can be used to characterize protein families and/or parts of proteins. Such domains have a “fingerprint” or “signature” that can comprise conserved primary sequence, secondary structure, and/or three-dimensional conformation. Generally, domains are correlated with specific in vitro and/or in vivo activities. A domain can have a length of from 10 amino acids to 400 amino acids, e.g., 10 to 50 amino acids, or 25 to 100 amino acids, or 35 to 65 amino acids, or 35 to 55 amino acids, or 45 to 60 amino acids, or 200 to 300 amino acids, or 300 to 400 amino acids.

[0052] “Down-regulation” refers to regulation that decreases production of expression products (mRNA, polypeptide, or both) relative to basal or native states.

[0053] “Exogenous” with respect to a nucleic acid indicates that the nucleic acid is part of a recombinant nucleic acid construct, or is not in its natural environment. For example, an exogenous nucleic acid can be a sequence from one species introduced into another species, i.e., a heterologous nucleic acid. Typically, such an exogenous nucleic acid is introduced into the other species via a recombinant nucleic acid construct. An exogenous nucleic acid can also be a sequence that is native to an organism and that has been reintroduced into cells of that organism. An exogenous nucleic acid that includes a native sequence can often be distinguished from the naturally occurring sequence by the presence of non-natural sequences linked to the exogenous nucleic acid, e.g., non-native regulatory sequences flanking a native sequence in a recombinant nucleic acid construct. In addition, stably transformed exogenous nucleic acids typically are integrated at positions other than the position where the native sequence is found. It will be appreciated that an exogenous nucleic acid may have been introduced into a progenitor and not into the cell under consideration. For example, a transgenic plant containing an exogenous nucleic acid can be the progeny of a cross between a stably transformed plant and a non-transgenic plant. Such progeny are considered to contain the exogenous nucleic acid.

[0054] “Expression” refers to the process of converting genetic information of a polynucleotide into RNA through transcription, which is catalyzed by an enzyme, RNA polymerase, and into protein, through translation of mRNA on ribosomes.

[0055] “Heterologous polypeptide” as used herein refers to a polypeptide that is not a naturally occurring polypeptide in a plant cell, e.g., a transgenic Panicum virgatum plant transformed with and expressing the coding sequence for a nitrogen transporter polypeptide from a Zea mays plant.

[0056] “Isolated nucleic acid” as used herein includes a naturally-occurring nucleic acid, provided one or both of the sequences immediately flanking that nucleic acid in its naturally-occurring genome is removed or absent. Thus, an isolated nucleic acid includes, without limitation, a nucleic acid that exists as a purified molecule or a nucleic acid molecule that is incorporated into a vector or a virus. A nucleic acid existing among hundreds to millions of other nucleic acids within, for example, cDNA libraries, genomic libraries, or gel slices containing a genomic DNA restriction digest, is not to be considered an isolated nucleic acid.

[0057] “Modulation” of the level of biomass refers to the change in the level of the biomass that is observed as a result of expression of, or transcription from, an exogenous nucleic acid in a plant cell and/or plant. The change in level is measured relative to the corresponding level in control plants.

[0058] “Nucleic acid” and “polynucleotide” are used interchangeably herein, and refer to both RNA and DNA, including cDNA, genomic DNA, synthetic DNA, and DNA or RNA containing nucleic acid analogs. A nucleic acid can be double-stranded or single-stranded (i.e., a sense strand or an antisense strand). Non-limiting examples of polynucleotides include genes, gene fragments, exons, introns, messenger RNA (mRNA), transfer RNA, ribosomal RNA, siRNA, micro-RNA, ribozymes, cDNA, recombinant polynucleotides, branched polynucleotides, nucleic acid probes and nucleic acid primers. A polynucleotide may contain unconventional or modified nucleotides.

[0059] “Operably linked” refers to the positioning of a regulatory region and a sequence to be transcribed in a nucleic acid so that the regulatory region is effective for regulating transcription or translation of the sequence. For example, to operably link a coding sequence and a regulatory region, the translation initiation site of the translational reading frame of the coding sequence is typically positioned between one and about fifty nucleotides downstream of the regulatory region. A regulatory region can, however, be positioned as much as about 5,000 nucleotides upstream of the translation initiation site, or about 2,000 nucleotides upstream of the transcription start site.

[0060] “Polypeptide” as used herein refers to a compound of two or more subunit amino acids, amino acid analogs, or other peptidomimetics, regardless of post-translational modification, e.g., phosphorylation or glycosylation. The subunits may be linked by peptide bonds or other bonds such as, for example, ester or ether bonds. Full-length polypeptides, truncated polypeptides, point mutants, insertion mutants, splice variants, chimeric proteins, and fragments thereof are encompassed by this definition.

[0061] “Progeny” includes descendants of a particular plant or plant line. Progeny of an instant plant include seeds formed on F₁, F₂, F₃, F₄, F₅, F₆ and subsequent generation plants, or seeds formed on BC₁, BC₂, BC₃, and subsequent generation plants, or seeds formed on F₁BC₁, F₁BC₂, F₁BC₃, and subsequent generation plants. The designation F₁ refers to the progeny of a cross between two parents that are genetically distinct. The designations F₂, F₃, F₄, F₅ and F₆ refer to subsequent generations of self- or sib-pollinated progeny of an F₁ plant.

[0062] “Regulatory region” refers to a nucleic acid having nucleotide sequences that influence transcription or translation initiation and rate, and stability and/or mobility of a transcription or translation product. Regulatory regions include, without limitation, promoter sequences, enhancer sequences, response elements, protein recognition sites, inducible elements, protein binding sequences, 5′ and 3′ untranslated regions (UTR5), transcriptional start sites, termination sequences, polyadenylation sequences, introns, and combinations thereof. A regulatory region typically comprises at least a core (basal) promoter. A regulatory region also may include at least one control element, such as an enhancer sequence, an upstream element or an upstream activation region (UAR). For example, a suitable enhancer is a cis-regulatory element (−212 to −154) from the upstream region of the octopine synthase (ocs) gene. Fromm et al., The Plant Cell, 1:977-984 (1989).

[0063] “Up-regulation” refers to regulation that increases the level of an expression product (mRNA, polypeptide, or both) relative to basal or native states.

[0064] “Vector” refers to a replicon, such as a plasmid, phage, or cosmid, into which another DNA segment may be inserted so as to bring about the replication of the inserted segment. Generally, a vector is capable of replication when associated with the proper control elements. The term “vector” includes cloning and expression vectors, as well as viral vectors and integrating vectors. An “expression vector” is a vector that includes a regulatory region.

### II. POLYPEPTIDES

[0065] Polypeptides described herein include biomass-modulating polypeptides. Biomass-modulating polypeptides can be effective to modulate biomass levels when expressed in a plant or plant cell. Such polypeptides typically contain at least one domain indicative of biomass-modulating polypeptides, as described in more detail herein. biomass-modulating polypeptides typically have an HMM bit score that is greater than 65 as described in more detail herein. In some embodiments, biomass-modulating polypeptides have greater than 80% identity to SEQ ID NOs: 1, 2, 4, 6, 8, 10, 11, 12, 13, 14, 15, 16, 17, 18, 20, 22, 24, 25, 27, 29, 30, 32, 33, 34, 36, 37, 38, 39, 40, 41, 43, 45, 47, 49, 50, 51, 53, 54, 56, 58, 59, 61, 63, 64, 66, 68, 70, 71, 72, 74, 75, 77, 79, 81, 82, 84, 86, 87, 88, 90, 92, 94, 96, 98, 100, 102, 104, 106, 108, 110, 112, 114, 115, 117, 118, 120, 121, 122, 123, 125, 127, 129, 131, 132, 133, 135, 137, 139, 141, 142, 144, 145, 146, 147, 149, 151, 152, 153, 154, 155, 156, 158, 160, 162, 163, 164, 166, 168, 169, 171, 173, 174, 176, 178, 180, 182, 184, 185, 186, 188, 189, 190, 191, 193, 194, 195, 196, 198, 200, 202, 203, 204, 206, 207, 209, 210, 212, 214, 216, 218, 220, 222, 224, 226, 228, 230, 232, 234, 236, 238, 239, 241, 242, 243, 244, 245, 246, 247, 248, 249, 250, 251, 253, 255, 257, 259, 261, 263, 264, 266, 268, 269, 271, 273, 275, 276, 278, 279, 281, 282, 283, 285, 287, 289, 291, 292, 294, 295, 296, 297, 298, 299, 300, 302, 304, 305, 306, 308, 310, 311, 312, 314, 315, 317, 319, 320, 321, 323, 324, 326, 327, 329, 331, 332, 334, 336, 337, 338, 340, 342, 343, 345, 347, 349, 351, 353, 354, 356, 357, 359, 361, 363, 365, 367, 369, 371, 372, 374, 376, 378, 380, 382, 384, 386, 388, 390, 391, 393, 395, 397, 399, 401, 403, 405, 406, 407, 409, 411, 413, 415, 416, 417, 418, 420, 421, 422, 424, 426, 428, 429, 430, 431, 433, 435, 436, 437, 438, 439, 440, 442, 444, 446, 447, 448, 449, 450, 452, 453, 454, 455, 456, 457, 459, 461, 463, 464, 466, 467, 468, 470, 472, 474, 476, 478, 479, 480, 482, 483, 484, 486, 488, 490, 492, 493, 495, 497, 499, 500, 501, 502, 503, 504, 506, 508, 509, 511, 513, 515, 516, 517, 518, 519, 521, 523, 525, 526, 528, 529, 531, 532, 534, 536, 537, 539, 540, 541, 543, 545, 547, 549, 550, 551, 552, 554, 556, 558, 560, 562, 563, 565, 567, 569, 571, 573, 574, 575, 577, 579, 581, 583, 585, 587, 589, 591, 593, 595, 597, 598, 600, 602, 603, 604, 605, 606, 608, 609, 610, 611, 613, 615, 616, 618, 619, 620, 622, 623, 625, 627, 629, 630, 632, 633, 634, 636, 637, 638, 639, 641, 642, 643, 645, 647, 649, 651, 652, 653, 655, 657, 659, 660, 662, 664, 666, 667, 669, 670, 671, 672, 673, 674, 675, 676, 677, 689, 691, 693, 695, or 697, as described in more detail herein.

[0066] A. Domains Indicative of Biomass-Modulating Polypeptides

[0067] A biomass-modulating polypeptide can contain a D of domain-zinc finger (zf-D of), which is predicted to be characteristic of a biomass-modulating polypeptide.

[0068] SEQ ID NO: 263 sets forth the amino acid sequence of an Arabidopsis clone, identified herein as Ceres Annot: 544549 (SEQ ID NO: 262), that is predicted to encode a polypeptide containing a D of domain-zinc finger. For example, a biomass-modulating polypeptide can comprise a D of domain-zinc finger having 60 percent or greater sequence identity to residues 130 to 192 of SEQ ID NO: 263. In some embodiments, a biomass-modulating polypeptide can comprise a D of domain-zinc finger having 60 percent or greater sequence identity to the D of domain-zinc finger of one or more of the polypeptides set forth in SEQ ID NOs: 263, 264, 266, 268, 269, 271, 273, 275, 276, 278, 279, 281, 282, 283, 285, 287, 289, 291, 292, 294, 295, 296, 297, 298, 299, 300, 302, 304, 305, 306, 308, 310, 311, 312, 314, 315, 317, 319, 320, or 321. The D of domain-zinc fingers of such sequences are set forth in the Sequence Listing. Zinc finger (Znf) domains are relatively small protein motifs that bind one or more zinc atoms, and which usually contain multiple finger-like protrusions that make tandem contacts with their target molecule. They were first identified as a DNA-binding motif in transcription factor TFIIIA from Xenopus laevis, however they are now recognized to bind DNA, RNA, protein and/or lipid substrates. Their binding properties depend on the amino acid sequence of the finger domains and of the linker between fingers, as well as on the higher-order structures and the number of fingers. Znf domains are often found in clusters, where fingers can have different binding specificities. There are many superfamilies of Znf motifs, varying in both sequence and structure. They display considerable versatility in binding modes, (e.g. some bind DNA, others protein), suggesting that Znf motifs are stable scaffolds that have evolved specialized functions. For example, Znf-containing proteins function in gene transcription, translation, mRNA trafficking, cytoskeleton organization, epithelial development, cell adhesion, protein folding, chromatin remodeling and zinc sensing, to name but a few. Zinc-binding motifs are stable structures, and they rarely undergo conformational changes upon binding their target. DOF 1.3 orthologs may contain D of domain-zinc fingers.

[0069] A biomass-modulating polypeptide can contain a phytochelatin synthetase-like domain, which is predicted to be characteristic of a biomass-modulating polypeptide. SEQ ID NO: 117 sets forth the amino acid sequence of an Arabidopsis clone, identified herein as Ceres Annot: 1355066 (SEQ ID NO: 116) that is predicted to encode a polypeptide containing a phytochelatin synthetase-like domain domain. For example, a biomass-modulating polypeptide can comprise a phytochelatin synthetase-like domain domain having 60 percent or greater sequence identity to residues 44 to 208 of SEQ ID NO: 117. In some embodiments, a biomass-modulating polypeptide can comprise a phytochelatin synthetase-like domain domain having 60 percent or greater sequence identity to the phytochelatin synthetase-like domain domain of one or more of the polypeptides set forth in SEQ ID NOs: 117, 118, 120, 121, 122, 123, 125, 127, 129, 131, 132, 133, 135, 137, 139, 141, 142, 144, 145, 146, 147, 149, 151, 152, 153, 154, 155, 156, 158, 160, 162, 163, 164, 166, 168, 169, 171, 173, 174, 176, 178, 180, 182, 184, 185, 186, 188, 189, 190, 191, 193, 194, 195, 196, 198, 200, 202, 203, 204, 206, or 207. The phytochelatin synthetase-like domain domains of such sequences are set forth in the Sequence Listing. Phytochelatin synthase-like protein may be an enzyme responsible for the synthesis of heavy-metal-binding peptides (phytochelatins) from glutathione and related thiols. The enzyme typically catalyses the deglycination of a GSH donor molecule. The enzyme typically contains a catalytic triad of cysteine, histidine and aspartate residues.

[0070] A biomass-modulating polypeptide can contain an AP2 domain, which is predicted to be characteristic of a biomass-modulating polypeptide. SEQ ID NO: 1 sets forth the amino acid sequence of an Oryza sativa clone, identified herein as Os01g58420 that is predicted to encode a polypeptide containing a AP2 domain. For example, a biomass-modulating polypeptide can comprise a AP2 domain having 60 percent or greater sequence identity to residues 32 to 83 of SEQ ID NO: 1. In some embodiments, a biomass-modulating polypeptide can comprise a AP2 domain having 60 percent or greater sequence identity to the AP2 domain of one or more of the polypeptides set forth in SEQ ID NOs: 1, 2, 4, 6, 8, 10, 11, 12, 13, 14, 15, 16, 17, 18, 20, 22, 24, 25, 27, 29, 30, 32, 33, 34, 36, 37, 38, 39, 40, 41, 43, 45, 47, 49, 50, 51, 53, 54, 56, 58, 59, 61, 63, 64, 66, 68, 70, 71, 72, 74, or 75. The AP2 domains of such sequences are set forth in the Sequence Listing. In some embodiments, an antisense sequence is expressed in a plant to modulate biomass as described herein. For example, an antisense nucleic acid sequence of Os01g58420 such as SEQ ID NO: 678, can be expressed in a plant to modulate biomass. AP2 domain amino acid residues can bind to DNA and are typically found in transcription factor proteins.

[0071] A biomass-modulating polypeptide can contain an Aminotransferase class I and II domain, which is predicted to be characteristic of a biomass-modulating polypeptide. SEQ ID NO: 645 sets forth the amino acid sequence of an Glycine max clone, identified herein as Ceres Clone:625057 (SEQ ID NO: 644), that is predicted to encode a polypeptide containing a Aminotransferase class I and II domain. For example, a biomass-modulating polypeptide can comprise an Aminotransferase class I and II domain having 60 percent or greater sequence identity to residues 88 to 453 of SEQ ID NO: 645. In some embodiments, a biomass-modulating polypeptide can comprise a Aminotransferase class I and II domain having 60 percent or greater sequence identity to the Aminotransferase class I and II domain of one or more of the polypeptides set forth in SEQ ID NOs: 645, 647, 649, 651, 652, 653, 655, 657, 659, 660, 662, 664, 666, 667, 669, 670, 671, 672, 673, 674, 675, 676, 677, or 689. The Aminotransferase class I and II domains of such sequences are set forth in the Sequence Listing. Aminotransferases share certain mechanistic features with other pyridoxal-phosphate dependent enzymes, such as the covalent binding of the pyridoxal-phosphate group to a lysine residue. On the basis of sequence similarity, these various enzymes can be grouped into class I and class II. Examples of polypeptides comprising Aminotransferase class I and II domains include LL-DAP polypeptides (EC 2.6.1.83) (Watanabe et al., Mechanism of Substrate Recognition and PLP-induced Conformational Changes in LL-Diaminopimelate aminotransferase from Arabidopsis thaliana. J. Mol. Biol. 384, 1314-1329 (2008)). LL-DAP catalyzes the interconversion of LL-2,6-diaminoheptanedioate and 2-oxoglutarate to (S)-2,3,4,5-tetrahydropyridine-2,6-dicarboxylate, L-glutamate, and water.

[0072] A biomass-modulating polypeptide can contain a Myb-like DNA-binding domain, which is predicted to be characteristic of a biomass-modulating polypeptide.

[0073] SEQ ID NO: 323 sets forth the amino acid sequence of an Glycine max clone, identified herein as Ceres Clone: 638126 (SEQ ID NO: 321), that is predicted to encode a polypeptide containing a Myb-like DNA-binding domain. For example, a biomass-modulating polypeptide can comprise a Myb-like DNA-binding domain having 60 percent or greater sequence identity to residues 13 to 62 of SEQ ID NO: 323. In some embodiments, a biomass-modulating polypeptide can comprise a Myb-like DNA-binding domain having 60 percent or greater sequence identity to the Myb-like DNA-binding domain of one or more of the polypeptides set forth in SEQ ID NOs: 323, 324, 326, 327, 329, 331, 332, 334, 336, 337, 338, 340, 342, 343, 345, 347, 349, 351, 353, 354, 356, 357, 359, 361, 363, 365, 367, 369, 371, 372, 374, 376, 378, 380, 382, 384, 386, 388, 390, 391, 393, 395, 397, 399, 401, 403, 405, 406, 407, 409, 411, 413, 415, 416, 417, 418, 420, 421, 422, or 424. The Myb-like DNA-binding domains of such sequences are set forth in the Sequence Listing. The Myb-like DNA-binding domain family contains the DNA binding domains from Myb proteins, as well as the SANT domain family.

[0074] A biomass-modulating polypeptide can contain an alpha/beta hydrolase fold domain, which is predicted to be characteristic of a biomass-modulating polypeptide. SEQ ID NO: 595 sets forth the amino acid sequence of an Arabidopsis clone, identified herein as Ceres Clone: 26006 (SEQ ID NO: 594), that is predicted to encode a polypeptide containing an alpha/beta hydrolase fold domain. For example, a biomass-modulating polypeptide can comprise an alpha/beta hydrolase fold domain having 60 percent or greater sequence identity to residues 35 to 257 of SEQ ID NO: 595. In some embodiments, a biomass-modulating polypeptide can comprise an alpha/beta hydrolase fold domain having 60 percent or greater sequence identity to the alpha/beta hydrolase fold domain of one or more of the polypeptides set forth in SEQ ID NOs: 595, 597, 598, 600, 602, 603, 604, 605, 606, 608, 609, 610, 611, 613, 615, 616, 618, 619, 620, 622, 623, 625, 627, 629, 630, 632, 633, 634, 636, 637, 638, 639, 641, 642, 643, or 691. The alpha/beta hydrolase fold domains of such sequences are set forth in the Sequence Listing. The alpha/beta hydrolase fold is common to a number of hydrolytic enzymes of widely differing phylogenetic origin and catalytic function. The core of each enzyme is an alpha/beta-sheet (rather than a barrel), containing 8 strands connected by helices. The enzymes are believed to have diverged from a common ancestor, preserving the arrangement of the catalytic residues. All have a catalytic triad, the elements of which are borne on loops, which are the best conserved structural features of the fold.

[0075] A biomass-modulating polypeptide can contain a Rapid Alkalinization Factor (RALF) domain, which is predicted to be characteristic of a biomass-modulating polypeptide. SEQ ID NO: 77 sets forth the amino acid sequence of an Arabidopsis clone, identified herein as Ceres Clone: 4831 (SEQ ID NO: 76), that is predicted to encode a polypeptide containing a RALF domain. For example, a biomass-modulating polypeptide can comprise a RALF domain having 60 percent or greater sequence identity to residues 57 to 129 of SEQ ID NO: 77. In some embodiments, a biomass-modulating polypeptide can comprise a RALF domain having 60 percent or greater sequence identity to the RALF domain of one or more of the polypeptides set forth in SEQ ID NOs: 77, 79, 81, 82, 84, 86, 87, 88, 90, 92, 94, 96, 98, 100, 102, 104, 106, 108, 110, 112, 114, or 115. The RALF domains of such sequences are set forth in the Sequence Listing. RALF domains are typically found in 5-kDa ubiquitous polypeptides in plants, which have been reported to play a role in the arrest of root growth and development in some plants.

[0076] A biomass-modulating polypeptide can contain a DUF640 domain, which is predicted to be characteristic of a biomass-modulating polypeptide. SEQ ID NO: 209 sets forth the amino acid sequence of an Arabidopsis clone, identified herein as Ceres Annot: 847799 (SEQ ID NO: 208), that is predicted to encode a polypeptide containing a DUF640 domain. For example, a biomass-modulating polypeptide can comprise a DUF640 domain having 60 percent or greater sequence identity to residues 19 to 152 of SEQ ID NO: 209. In some embodiments, a biomass-modulating polypeptide can comprise a DUF640 domain having 60 percent or greater sequence identity to the DUF640 domain of one or more of the polypeptides set forth in SEQ ID NOs: 209, 210, 212, 214, 216, 218, 220, 222, 224, 226, 228, 230, 232, 234, 236, 238, 239, 241, 242, 243, 244, 245, 246, 247, 248, 249, 250, or 251. The DUF640 domains of such sequences are set forth in the Sequence Listing.

[0077] A biomass-modulating polypeptide can contain a PTR2 POT family domain, which is predicted to be characteristic of a biomass-modulating polypeptide. SEQ ID NO: 426 sets forth the amino acid sequence of an Arabidopsis clone, identified herein as Ceres Annot: 878355 (SEQ ID NO: 425), that is predicted to encode a polypeptide containing a PTR2 POT family domain. For example, a biomass-modulating polypeptide can comprise a PTR2 POT family domain having 60 percent or greater sequence identity to residues 100 to 509 of SEQ ID NO: 426. In some embodiments, a biomass-modulating polypeptide can comprise a PTR2 POT family domain having 60 percent or greater sequence identity to the PTR2 POT family domain of one or more of the polypeptides set forth in SEQ ID NOs: 426, 428, 429, 430, 431, 433, 435, 436, 437, 438, 439, 440, 442, 444, 446, 447, 448, 449, 450, 452, 453, 454, 455, 456, 457, 459, 461, 463, 464, 466, 467, 468, 470, 472, 474, 476, 478, 479, 480, 482, 483, 484, 486, 488, 490, 492, 493, 495, 497, 499, 500, 501, 502, 503, 504, 506, 508, 509, 511, 513, 515, 516, 517, 518, 519, 521, 523, 525, 526, 528, 529, 531, 532, 534, 536, 537, 539, 540, 541, 543, 545, 547, 549, 550, 551, 552, 693, 695, or 697. The PTR2 POT family domains of such sequences are set forth in the Sequence Listing. The transport of peptides into cells is a well-documented biological phenomenon which is accomplished by specific, energy-dependent transporters found in a number of organisms as diverse as bacteria and humans. The PTR family of proteins is distinct from the ABC-type peptide transporters and was uncovered by sequence analyses of a number of recently discovered peptide transport proteins. These proteins seem to be mainly involved in the intake of small peptides with the concomitant uptake of a proton. In some embodiments, a POT protein as described herein can comprise an N-terminus signal peptide. In some embodiments, the signal peptide may be specific for a plasma membrane. In some embodiments, the signal peptide may be specific for a endoplasmic reticulum membrane or a chloroplast membrane. Examples of signal peptides are shown in the Sequence Listing of the application. Bioinformatics techniques can be employed to predict the presence and type of transit peptides.

[0078] These approaches do not rely exclusively on sequence similarity. Because orthologous proteins more often have the same localization, the degree of sequence similarity needed to infer co-localization is higher than for similar three-dimensional structure, and isoforms of the same protein may have different localization. WoLF PSORT can be used to predict signal peptides (Horton et al., 2007 “WoLF PSORT: Protein Localization Predictor”, Nucleic Acids Research, doi:10.1093/nar/gkm259, 2007; Horton et al., 2006 “Protein Subcellular Localization Prediction with WoLF PSORT”, Proceedings of the 4th Annual Asia Pacific Bioinformatics Conference APBC06, Taipei, Taiwan. pp. 39-48, 2006). Examples of signal peptides from sequences in the public domain can be obtained from a WoLF PSORT analysis of a sequence which provides numerous orthologous signal peptides.

[0079] In eukaryotic organisms, there are several types of signal peptides and related sorting signals all of which involve membrane translocation and/or insertion. Typically, signal peptides specific for the endoplasmic reticulum (ER) are co-translational, whereas signal peptides specific for the mitochondria or chloroplast are post-translational, but unfolded by chaperones. For example, an N-terminal signal with variable length hydrophobic section, causes proteins to be co-translationally transported through or into the endoplasmic reticulum membrane. N-terminal signals are mostly independent of carrier proteins. Such signal peptides are typically interchangeable between different proteins, are typically cleaved, and are typically limited to about the first 90 amino acid residues. Cleavage, presence on N-terminal, and co-translational recognition make signal peptides typically orthogonal to protein function, but this is a general relationship. In some embodiments, a POT protein as described herein can comprise a C-terminal sorting signal. Examples of C-terminal sorting signals include, but are not limited to, KDEL (soluble) or KKXX (membrane protein) signal for ER retention, SKL for peroxisomal targeting (soluble), NPIR for vacuole, and LPXTG for bacterial cell wall. In some embodiments, a POT protein as described herein can comprise an internal sorting signal. Such signals include nuclear localization signals that occur on the surface of a folded protein but can be anywhere on the 1-dimensional sequence. In some embodiments, a POT protein as described herein can comprise an N-terminus signal peptide that is about 95, 90, 85, 80, 75, 70, 65, 60, 55, 50, 45, 40, 35, 30, 25, 20, 15, 10, or 5 amino acids in length beginning from the N-terminus of said POT protein. In some embodiments, a POT protein as described herein is lacking all or part of an N-terminus signal peptide. In some embodiments, a POT protein as described herein can have an N-terminus signal peptide removed and replaced with a different an N-terminus signal peptide. For example, one skilled in the art can remove or synthesize a sequence without the 45 N-terminus amino acids of SEQ ID NO: (426) and add, through fusion techniques or through synthesis, another signal peptide with specificity for the same or a different target membrane.

[0080] In some embodiments, a biomass-modulating polypeptide is truncated at the amino- or carboxy-terminal end of a naturally occurring polypeptide. A truncated polypeptide may retain certain domains of the naturally occurring polypeptide while lacking others. Thus, length variants that are up to 5 amino acids shorter or longer typically exhibit the biomass-modulating activity of a truncated polypeptide. In some embodiments, a truncated polypeptide is a dominant negative polypeptide. Expression in a plant of such a truncated polypeptide confers a difference in the level of biomass of a plant as compared to the corresponding level of a control plant that does not comprise the truncation.

[0081] B. Functional Homologs Identified by Reciprocal BLAST

[0082] In some embodiments, one or more functional homologs of a reference biomass-modulating polypeptide defined by one or more of the Pfam descriptions indicated above are suitable for use as biomass-modulating polypeptides. A functional homolog is a polypeptide that has sequence similarity to a reference polypeptide, and that carries out one or more of the biochemical or physiological function(s) of the reference polypeptide. A functional homolog and the reference polypeptide may be natural occurring polypeptides, and the sequence similarity may be due to convergent or divergent evolutionary events. As such, functional homologs are sometimes designated in the literature as homologs, or orthologs, or paralogs. Variants of a naturally occurring functional homolog, such as polypeptides encoded by mutants of a wild type coding sequence, may themselves be functional homologs. Functional homologs can also be created via site-directed mutagenesis of the coding sequence for a biomass-modulating polypeptide, or by combining domains from the coding sequences for different naturally-occurring biomass-modulating polypeptides (“domain swapping”). The term “functional homolog” is sometimes applied to the nucleic acid that encodes a functionally homologous polypeptide.

[0083] Functional homologs can be identified by analysis of nucleotide and polypeptide sequence alignments. For example, performing a query on a database of nucleotide or polypeptide sequences can identify homologs of biomass-modulating polypeptides. Sequence analysis can involve BLAST, Reciprocal BLAST, or PSI-BLAST analysis of nonredundant databases using a biomass-modulating polypeptide amino acid sequence as the reference sequence. Amino acid sequence is, in some instances, deduced from the nucleotide sequence. Those polypeptides in the database that have greater than 40% sequence identity are candidates for further evaluation for suitability as a biomass-modulating polypeptide. Amino acid sequence similarity allows for conservative amino acid substitutions, such as substitution of one hydrophobic residue for another or substitution of one polar residue for another. If desired, manual inspection of such candidates can be carried out in order to narrow the number of candidates to be further evaluated. Manual inspection can be performed by selecting those candidates that appear to have domains present in biomass-modulating polypeptides, e.g., conserved functional domains.

[0084] Conserved regions can be identified by locating a region within the primary amino acid sequence of a biomass-modulating polypeptide that is a repeated sequence, forms some secondary structure (e.g., helices and beta sheets), establishes positively or negatively charged domains, or represents a protein motif or domain. See, e.g., the Pfam web site describing consensus sequences for a variety of protein motifs and domains on the World Wide Web at sanger.ac.uk/Software/Pfam/ and pfam.janelia.org/. A description of the information included at the Pfam database is described in Sonnhammer et al., Nucl. Acids Res., 26:320-322 (1998); Sonnhammer et al., Proteins, 28:405-420 (1997); and Bateman et al., Nucl. Acids Res., 27:260-262 (1999). Conserved regions also can be determined by aligning sequences of the same or related polypeptides from closely related species. Closely related species preferably are from the same family. In some embodiments, alignment of sequences from two different species is adequate.

[0085] Typically, polypeptides that exhibit at least about 40% amino acid sequence identity are useful to identify conserved regions. Conserved regions of related polypeptides exhibit at least 45% amino acid sequence identity (e.g., at least 50%, at least 60%, at least 70%, at least 80%, or at least 90% amino acid sequence identity). In some embodiments, a conserved region exhibits at least 92%, 94%, 96%, 98%, or 99% amino acid sequence identity.

[0086] Examples of amino acid sequences of functional homologs of the polypeptide set forth in SEQ ID NO: 554 are provided in FIG. 1 and in the Sequence Listing. Such functional homologs include, for example, CeresAnnot:564098 (SEQ ID NO: 556), CeresAnnot:1443290 (SEQ ID NO: 558), CeresClone:1042157 (SEQ ID NO: 560), CeresClone:1919714 (SEQ ID NO: 562), GI:157336039 (SEQ ID NO: 563), CeresAnnot:8454153 (SEQ ID NO: 565), CeresAnnot:1722302 (SEQ ID NO: 567), CeresAnnot:8733140 (SEQ ID NO: 569), CeresAnnot:1452096 (SEQ ID NO: 571), CeresClone:1645639 (SEQ ID NO: 573), GI:157344920 (SEQ ID NO: 574), GI:115440865 (SEQ ID NO: 575), CeresClone:340925 (SEQ ID NO: 577), CeresAnnot:8669404 (SEQ ID NO: 579), CeresClone:100028078 (SEQ ID NO: 581), CeresAnnot:1503869 (SEQ ID NO: 583), CeresAnnot:1525651 (SEQ ID NO: 585), CeresClone:2031281 (SEQ ID NO: 587), CeresClone:483742 (SEQ ID NO: 589), CeresClone:100802111 (SEQ ID NO: 591), or CeresClone:1460255 (SEQ ID NO: 593). In some cases, a functional homolog of SEQ ID NO: 554 has an amino acid sequence with at least 45% sequence identity, e.g., 50%, 52%, 56%, 59%, 61%, 65%, 70%, 75%, 80%, 85%, 90%, 95%, 97%, 98%, or 99% sequence identity, to the amino acid sequence set forth in SEQ ID NO: 554.

[0087] Examples of amino acid sequences of functional homologs of the polypeptide set forth in SEQ ID NO: 263 are provided in FIG. 2 and in the Sequence Listing. Such functional homologs include, for example, GI:157355009 (SEQ ID NO: 264), CeresAnnot:1464457 (SEQ ID NO: 266), CeresClone:1584660 (SEQ ID NO: 268), GI:115474149 (SEQ ID NO: 269), CeresAnnot:8636233 (SEQ ID NO:271), CeresClone:1777035 (SEQ ID NO: 273), CeresClone:1990929 (SEQ ID NO: 275), GI:194692166 (SEQ ID NO: 276), CeresAnnot:1458507 (SEQ ID NO: 278), GI:147780712 (SEQ ID NO:279), CeresAnnot:8642924 (SEQ ID NO: 281), GI:115451001 (SEQ ID NO: 282), AAF87041 (SEQ ID NO: 283), CeresClone:1573856 (SEQ ID NO: 285), CeresAnnot:1476818 (SEQ ID NO:287), CeresAnnot:1450024 (SEQ ID NO: 289), CeresAnnot:1503065 (SEQ ID NO: 291), GI:147866358 (SEQ ID NO: 292), CeresClone:230073 (SEQ ID NO: 294), (SEQ ID NO:295), (SEQ ID NO: 296), GI:78708599 (SEQ ID NO: 297), GI:15451553 (SEQ ID NO: 298), GI:125542572 (SEQ ID NO: 299), GI:157342426 (SEQ ID NO:300), CeresAnnot:538622 (SEQ ID NO: 302), CeresAnnot:8460661 (SEQ ID NO: 304), GI:15983797 (SEQ ID NO: 305), GI:115435804 (SEQ ID NO: 306), CeresClone:1599579 (SEQ ID NO:308), CeresAnnot:1469831 (SEQ ID NO: 310), GI:9758342 (SEQ ID NO: 311), GI:21536859 (SEQ ID NO: 312), CeresClone:113639 (SEQ ID NO: 314), GI:15232818 (SEQ ID NO: 315), CeresClone:1571328 (SEQ ID NO: 317), CeresClone:1868988 (SEQ ID NO: 319), GI:1669341 (SEQ ID NO: 320), or GI:157359317 (SEQ ID NO: 321). In some cases, a functional homolog of SEQ ID NO: 263 has an amino acid sequence with at least 45% sequence identity, e.g., 50%, 52%, 56%, 59%, 61%, 65%, 70%, 75%, 80%, 85%, 90%, 95%, 97%, 98%, or 99% sequence identity, to the amino acid sequence set forth in SEQ ID NO: 263.

[0088] Examples of amino acid sequences of functional homologs of the polypeptide set forth in SEQ ID NO: 117 are provided in FIG. 3 and in the Sequence Listing. Such functional homologs include, for example, GI:90657534 (SEQ ID NO: 118), CeresClone:1237946 (SEQ ID NO: 120), GI:118488472 (SEQ ID NO: 121), GI:38194917 (SEQ ID NO: 122), GI:157341292 (SEQ ID NO: 123), CeresClone:1957107 (SEQ ID NO: 125), CeresAnnot:8640603 (SEQ ID NO: 127), CeresClone:829440 (SEQ ID NO: 129), CeresClone:285169 (SEQ ID NO: 131), GI:116790012 (SEQ ID NO: 132), GI:157356290 (SEQ ID NO: 133), CeresAnnot:1450186 (SEQ ID NO: 135), CeresClone:1804732 (SEQ ID NO: 137), CeresClone:1781794 (SEQ ID NO: 139), CeresAnnot:8656625 (SEQ ID NO: 141), GI:162462515 (SEQ ID NO: 142), CeresClone:570485 (SEQ ID NO: 144), GI:125586664 (SEQ ID NO: 145), GI:116788824 (SEQ ID NO: 146), GI:115453531 (SEQ ID NO: 147), CeresClone:17250 (SEQ ID NO: 149), CeresAnnot:1363625 (SEQ ID NO: 151), GI:75133694 (SEQ ID NO: 152), GI:147780878 (SEQ ID NO: 153), GI:157341291 (SEQ ID NO: 154), GI:38194916 (SEQ ID NO: 155), GI:157356291 (SEQ ID NO: 156), CeresClone:1883580 (SEQ ID NO: 158), CeresClone:1848658 (SEQ ID NO: 160), CeresAnnot:1450185 (SEQ ID NO: 162), GI:13477083 (SEQ ID NO: 163), GI:115463639 (SEQ ID NO: 164), CeresClone:98007 (SEQ ID NO: 166), CeresAnnot:1326475 (SEQ ID NO: 168), GI:115473243 (SEQ ID NO: 169), CeresAnnot:870466 (SEQ ID NO: 171), CeresClone:1806851 (SEQ ID NO: 173), GI:75133695 (SEQ ID NO: 174), CeresClone:1788775 (SEQ ID NO: 176), CeresClone:1546455 (SEQ ID NO: 178), CeresClone:1902642 (SEQ ID NO: 180), CeresAnnot:8632643 (SEQ ID NO: 182), CeresClone:236876 (SEQ ID NO: 184), GI:90657629 (SEQ ID NO: 185), GI:30090032 (SEQ ID NO: 186), CeresAnnot:8640602 (SEQ ID NO: 188), GI:115453533 (SEQ ID NO: 189), GI:162462330 (SEQ ID NO: 190), GI:38230578 (SEQ ID NO: 191), CeresAnnot:8632641 (SEQ ID NO: 193), GI:168016456 (SEQ ID NO: 194), GI:125532513 (SEQ ID NO: 195), GI:157354382 (SEQ ID NO: 196), CeresAnnot:1481980 (SEQ ID NO: 198), CeresAnnot:1535466 (SEQ ID NO: 200), CeresAnnot:1297618 (SEQ ID NO: 202), GI:119040466 (SEQ ID NO: 203), GI:116310381 (SEQ ID NO: 204), CeresAnnot:8702104 (SEQ ID NO: 206), or GI:157340500 (SEQ ID NO: 207). In some cases, a functional homolog of SEQ ID NO: 117 has an amino acid sequence with at least 45% sequence identity, e.g., 50%, 52%, 56%, 59%, 61%, 65%, 70%, 75%, 80%, 85%, 90%, 95%, 97%, 98%, or 99% sequence identity, to the amino acid sequence set forth in SEQ ID NO: 117.

[0089] Examples of amino acid sequences of functional homologs of the polypeptide set forth in SEQ ID NO: 1 are provided in FIG. 4 and in the Sequence Listing. Such functional homologs include, for example, GI:84795244 (SEQ ID NO:2), CeresClone:1725396 (SEQ ID NO:4), CeresAnnot:8669118 (SEQ ID NO:6), CeresClone:280241 (SEQ ID NO:8), CeresClone:1712594 (SEQ ID NO:10), GI:190361125 (SEQ ID NO:11), GI:4099921 (SEQ ID NO:12), GI:147844573 (SEQ ID NO:13), GI:67906426 (SEQ ID NO:14), GI:57012757 (SEQ ID NO:15), GI:56567583 (SEQ ID NO:16), GI:84795246 (SEQ ID NO:17), GI:84795248 (SEQ ID NO:18), CeresClone:1805203 (SEQ ID NO:20), CeresClone:101497672 (SEQ ID NO:22), CeresClone:224845 (SEQ ID NO:24), GI:115464685 (SEQ ID NO:25), CeresClone:1287030 (SEQ ID NO:27), CeresAnnot:8733383 (SEQ ID NO:29), GI:84795240 (SEQ ID NO:30), CeresClone:1806017 (SEQ ID NO:32), GI:84795242 (SEQ ID NO:33), GI:84795238 (SEQ ID NO:34), CeresClone:1733772 (SEQ ID NO:36), GI:37625037 (SEQ ID NO:37), GI:37625035 (SEQ ID NO:38), GI:147805535 (SEQ ID NO:39), GI:157358724 (SEQ ID NO:40), GI:4099914 (SEQ ID NO:41), CeresAnnot:1520029 (SEQ ID NO:43), CeresClone:1065091 (SEQ ID NO:45), CeresClone:1793792 (SEQ ID NO:47), CeresClone:1619220 (SEQ ID NO:49), GI:57012875 (SEQ ID NO:50), GI:147811787 (SEQ ID NO:51), CeresClone:1842925 (SEQ ID NO:53), GI:20340233 (SEQ ID NO:54), CeresClone:1657843 (SEQ ID NO:56), CeresAnnot:1455887 (SEQ ID NO:58), GI:118490009 (SEQ ID NO:59), CeresClone:1381515 (SEQ ID NO:61), CeresClone:22775 (SEQ ID NO:63), GI:60459377 (SEQ ID NO:64), CeresAnnot:1488231 (SEQ ID NO:66), CeresClone:1884969 (SEQ ID NO:68), CeresClone:1802100 (SEQ ID NO:70), GI:156145802 (SEQ ID NO:71), GI:28274832 (SEQ ID NO:72), CeresClone:568399 (SEQ ID NO:74), or GI:115460458 (SEQ ID NO:75). In some cases, a functional homolog of SEQ ID NO: 1 has an amino acid sequence with at least 45% sequence identity, e.g., 50%, 52%, 56%, 59%, 61%, 65%, 70%, 75%, 80%, 85%, 90%, 95%, 97%, 98%, or 99% sequence identity, to the amino acid sequence set forth in SEQ ID NO: 1.

[0090] Examples of amino acid sequences of functional homologs of the polypeptide set forth in SEQ ID NO: 645 are provided in FIG. 5 and in the Sequence Listing. Such functional homologs include, for example CeresClone:1925947 (SEQ ID NO: 647), CeresAnnot:1514501 (SEQ ID NO:649), CeresAnnot:849672 (SEQ ID NO:651), GI:157355942 (SEQ ID NO:652), GI:115452503 (SEQ ID NO: 653), CeresClone:1790933 (SEQ ID NO:655), CeresAnnot:8641620 (SEQ ID NO:657), CeresClone:281497 (SEQ ID NO:659), GI:168013851 (SEQ ID NO: 660), CeresClone:143214 (SEQ ID NO:662), CeresClone:1781022 (SEQ ID NO:664), CeresClone:618639 (SEQ ID NO:666), GI:118483001 (SEQ ID NO: 667), CeresClone:38404 (SEQ ID NO:669), GI:3549670 (SEQ ID NO:670), GI:37703720 (SEQ ID NO:671), GI:152149571 (SEQ ID NO: 672), GI:125603687 (SEQ ID NO:673), GI:108707679 (SEQ ID NO:674), GI:157352390 (SEQ ID NO:675), GI:159469820 (SEQ ID NO: 676), GI:145344081 (SEQ ID NO:677), or Ceres Annot ID no. 1461228 (SEQ ID NO:689). In some cases, a functional homolog of SEQ ID NO: 645 has an amino acid sequence with at least 45% sequence identity, e.g., 50%, 52%, 56%, 59%, 61%, 65%, 70%, 75%, 80%, 85%, 90%, 95%, 97%, 98%, or 99% sequence identity, to the amino acid sequence set forth in SEQ ID NO: 645.

[0091] Examples of amino acid sequences of functional homologs of the polypeptide set forth in SEQ ID NO: 253 are provided in FIG. 6 and in the Sequence Listing. Such functional homologs include, for example, CeresClone:951785 (SEQ ID NO: 255), CeresAnnot:1440346 (SEQ ID NO: 257), CeresClone:1085177 (SEQ ID NO: 259), or CeresClone:157151 (SEQ ID NO: 261). In some cases, a functional homolog of SEQ ID NO: 253 has an amino acid sequence with at least 45% sequence identity, e.g., 50%, 52%, 56%, 59%, 61%, 65%, 70%, 75%, 80%, 85%, 90%, 95%, 97%, 98%, or 99% sequence identity, to the amino acid sequence set forth in SEQ ID NO: 253.

[0092] Examples of amino acid sequences of functional homologs of the polypeptide set forth in SEQ ID NO: 323 are provided in FIG. 7 and in the Sequence Listing. Such functional homologs include, for example, GI:157340812 (SEQ ID NO:324), CeresAnnot:1460824 (SEQ ID NO:326), GI:145356202 (SEQ ID NO:327), CeresClone:477814 (SEQ ID NO:329), CeresClone:1914387 (SEQ ID NO:331), GI:7981380 (SEQ ID NO:332), CeresClone:1910072 (SEQ ID NO:334), CeresClone:331755 (SEQ ID NO:336), GI:124360540 (SEQ ID NO:337), GI:157335318 (SEQ ID NO:338), CeresAnnot:1503394 (SEQ ID NO:340), CeresAnnot:1442707 (SEQ ID NO:342), GI:147784500 (SEQ ID NO:343), CeresAnnot:1514100 (SEQ ID NO:345), CeresAnnot:850366 (SEQ ID NO:347), CeresAnnot:543794 (SEQ ID NO:349), CeresAnnot:1495620 (SEQ ID NO:351), CeresClone:1653552 (SEQ ID NO:353), GI:147767321 (SEQ ID NO:354), CeresAnnot:1510450 (SEQ ID NO:356), GI:110931736 (SEQ ID NO:357), CeresClone:1916884 (SEQ ID NO:359), CeresClone:1847251 (SEQ ID NO:361), CeresAnnot:1457249 (SEQ ID NO:363), CeresClone:1113584 (SEQ ID NO:365), CeresClone:1927753 (SEQ ID NO:367), CeresClone:857342 (SEQ ID NO:369), CeresClone:100068619 (SEQ ID NO:371), GI:145327247 (SEQ ID NO:372), CeresAnnot:8461532 (SEQ ID NO:374), CeresClone:1722230 (SEQ ID NO:376), CeresClone:1897493 (SEQ ID NO:378), CeresAnnot:838426 (SEQ ID NO:380), CeresAnnot:827713 (SEQ ID NO:382), CeresClone:1763593 (SEQ ID NO:384), CeresClone:143475 (SEQ ID NO:386), CeresAnnot:8456508 (SEQ ID NO:388), CeresClone:100002959 (SEQ ID NO:390), GI:118137433 (SEQ ID NO:391), CeresClone:1523182 (SEQ ID NO:393), CeresClone:1761808 (SEQ ID NO:395), CeresClone:1069222 (SEQ ID NO:397), CeresAnnot:8734209 (SEQ ID NO:399), CeresAnnot:8461540 (SEQ ID NO:401), CeresClone:1086604 (SEQ ID NO:403), CeresClone:41695 (SEQ ID NO:405), GI:112292440 (SEQ ID NO:406), GI:116830269 (SEQ ID NO:407), CeresClone:1775942 (SEQ ID NO:409), CeresClone:1723374 (SEQ ID NO:411), CeresAnnot:1457230 (SEQ ID NO:413), CeresAnnot:8667653 (SEQ ID NO:415), GI:115465643 (SEQ ID NO:416), GI:5091605 (SEQ ID NO:417), GI:125553458 (SEQ ID NO:418), CeresAnnot:1510435 (SEQ ID NO:420), GI:115438765 (SEQ ID NO:421), GI:112292438 (SEQ ID NO:422), or CeresAnnot:1770841 (SEQ ID NO:424). In some cases, a functional homolog of SEQ ID NO: 323 has an amino acid sequence with at least 45% sequence identity, e.g., 50%, 52%, 56%, 59%, 61%, 65%, 70%, 75%, 80%, 85%, 90%, 95%, 97%, 98%, or 99% sequence identity, to the amino acid sequence set forth in SEQ ID NO: 323.

[0093] Examples of amino acid sequences of functional homologs of the polypeptide set forth in SEQ ID NO: 595 are provided in FIG. 8 and in the Sequence Listing. Such functional homologs include, for example, CeresClone:644331 (SEQ ID NO: 597), GI:15227859 (SEQ ID NO: 598), CeresAnnot:1504349 (SEQ ID NO: 600), CeresAnnot:1265088 (SEQ ID NO: 602), (SEQ ID NO: 603), GI:125527987 (SEQ ID NO: 604), GI:14279437 (SEQ ID NO: 605), ES902065 (SEQ ID NO: 606), CeresClone:1065042 (SEQ ID NO: 608), GI:157329790 (SEQ ID NO: 609), GI:15227861 (SEQ ID NO: 610), GI:146272407 (SEQ ID NO: 611), CeresClone:95094 (SEQ ID NO: 613), CeresClone:1714893 (SEQ ID NO: 615), GI:157329890 (SEQ ID NO: 616), CeresAnnot:859635 (SEQ ID NO: 618), GI:115440397 (SEQ ID NO: 619), GI:40549303 (SEQ ID NO: 620), CeresAnnot:1457048 (SEQ ID NO: 622), GI:50401192 (SEQ ID NO: 623), CeresAnnot:1451281 (SEQ ID NO: 625), CeresAnnot:1510252 (SEQ ID NO: 627), CeresClone:1822691 (SEQ ID NO: 629), GI:197312921 (SEQ ID NO: 630), CeresAnnot:8456439 (SEQ ID NO: 632), EX096388 (SEQ ID NO: 633), GI:15028131 (SEQ ID NO: 634), CeresClone:270875 (SEQ ID NO: 636), GI:27754457 (SEQ ID NO: 637), GI:16648679 (SEQ ID NO: 638), GI:15227863 (SEQ ID NO: 639), CeresAnnot:1451282 (SEQ ID NO: 641), GI:53830670 (SEQ ID NO: 642), GI:146272405 (SEQ ID NO: 643), or CeresAnnot:827940 (SEQ ID NO:691). In some cases, a functional homolog of SEQ ID NO: 595 has an amino acid sequence with at least 45% sequence identity, e.g., 50%, 52%, 56%, 59%, 61%, 65%, 70%, 75%, 80%, 85%, 90%, 95%, 97%, 98%, or 99% sequence identity, to the amino acid sequence set forth in SEQ ID NO: 595.

[0094] Examples of amino acid sequences of functional homologs of the polypeptide set forth in SEQ ID NO: 77 are provided in FIG. 9 and in the Sequence Listing. Such functional homologs include, for example, CeresClone:1387948 (SEQ ID NO: 79), CeresClone:1937714 (SEQ ID NO: 81), GI:157345132 (SEQ ID NO: 82), CeresClone:464828 (SEQ ID NO: 84), CeresAnnot:1451368 (SEQ ID NO: 86), GI:37695575 (SEQ ID NO: 87), GI:116790033 (SEQ ID NO: 88), CeresClone:1346042 (SEQ ID NO: 90), CeresClone:1118610 (SEQ ID NO: 92), CeresClone:982000 (SEQ ID NO: 94), CeresClone:959670 (SEQ ID NO: 96), CeresClone:952522 (SEQ ID NO: 98), CeresClone:1914539 (SEQ ID NO: 100), CeresClone:668581 (SEQ ID NO: 102), CeresClone:1914939 (SEQ ID NO: 104), CeresClone:723694 (SEQ ID NO: 106), CeresAnnot:1456949 (SEQ ID NO: 108), CeresAnnot:1539918 (SEQ ID NO: 110), CeresAnnot:8456138 (SEQ ID NO: 112), CeresAnnot:1486506 (SEQ ID NO: 114), or GI:116786293 (SEQ ID NO: 115). In some cases, a functional homolog of SEQ ID NO: 77 has an amino acid sequence with at least 45% sequence identity, e.g., 50%, 52%, 56%, 59%, 61%, 65%, 70%, 75%, 80%, 85%, 90%, 95%, 97%, 98%, or 99% sequence identity, to the amino acid sequence set forth in SEQ ID NO: 77.

[0095] Examples of amino acid sequences of functional homologs of the polypeptide set forth in SEQ ID NO: 209 are provided in FIG. 10 and in the Sequence Listing. Such functional homologs include, for example, GI:116780542 (SEQ ID NO: 210), CeresClone:1848017 (SEQ ID NO: 212), CeresAnnot:1466494 (SEQ ID NO: 214), CeresAnnot:1449022 (SEQ ID NO: 216), CeresAnnot:1482911 (SEQ ID NO: 218), CeresClone:1118987 (SEQ ID NO: 220), CeresClone:1073674 (SEQ ID NO: 222), CeresClone:1084747 (SEQ ID NO: 224), CeresClone:536345 (SEQ ID NO: 226), CeresClone:1650005 (SEQ ID NO: 228), CeresAnnot:8453882 (SEQ ID NO: 230), CeresAnnot:1373087 (SEQ ID NO: 232), CeresAnnot:8669372 (SEQ ID NO: 234), CeresClone:1048839 (SEQ ID NO: 236), CeresClone:281322 (SEQ ID NO: 238), GI:147795605 (SEQ ID NO: 239), CeresClone:2004419 (SEQ ID NO: 241), GI:125543059 (SEQ ID NO: 242), AT1G16910_LSH8 (SEQ ID NO: 243), AT1G78815_LSH7 (SEQ ID NO: 244), AT2G31160_LSH3 (SEQ ID NO: 245), AT2G42610_LSH10 (SEQ ID NO: 246), AT3G04510_LSH2 (SEQ ID NO: 247), AT3G23290_LSH4 (SEQ ID NO: 248), AT5G28490_LSH1 (SEQ ID NO: 249), AT5G58500_LSH5 (SEQ ID NO: 250), or At1g07090_LSH6 (SEQ ID NO: 251). In some cases, a functional homolog of SEQ ID NO: 209 has an amino acid sequence with at least 45% sequence identity, e.g., 50%, 52%, 56%, 59%, 61%, 65%, 70%, 75%, 80%, 85%, 90%, 95%, 97%, 98%, or 99% sequence identity, to the amino acid sequence set forth in SEQ ID NO: 209.

[0096] Examples of amino acid sequences of functional homologs of the polypeptide set forth in SEQ ID NO: 426 are provided in FIG. 11 and in the Sequence Listing. Such functional homologs include, for example, CeresAnnot:1472338_Pb (SEQ ID NO: 428), GI:157344683_Vv (SEQ ID NO: 429), GI:87240677 Mt (SEQ ID NO: 430), GI:115448297_Os (SEQ ID NO: 431), CeresClone:1844568_Pv (SEQ ID NO: 433), CeresClone:797829_Tm (SEQ ID NO: 435), GI:168033816_Pp (SEQ ID NO: 436), GI:116788004_Ps (SEQ ID NO: 437), GI:149900503_Ha (SEQ ID NO: 438), GI:4102839_S1 (SEQ ID NO: 439), GI:31088360_Vf (SEQ ID NO: 440), CeresAnnot:8681236_Sb (SEQ ID NO: 442), CeresAnnot:8519531_Gm (SEQ ID NO: 444), CeresAnnot:8631372_Zm (SEQ ID NO: 446), GI:151426449_Hv (SEQ ID NO: 447), GI:192757675_Br (SEQ ID NO: 448), GI:2655098 (SEQ ID NO: 449), GI:194690746 (SEQ ID NO: 450), CeresClone:752925 (SEQ ID NO: 452), GI:125540898 (SEQ ID NO: 453), GI:26451333 (SEQ ID NO: 454), GI:2160144 (SEQ ID NO: 455), GI:30696666 (SEQ ID NO: 456), GI:125556922 (SEQ ID NO: 457), CeresAnnot:1529287 (SEQ ID NO: 459), CeresClone:1806748 (SEQ ID NO: 461), CeresAnnot:8755095 (SEQ ID NO: 463), GI:147827175 (SEQ ID NO: 464), CeresClone:1888865 (SEQ ID NO: 466), GI:157337163 (SEQ ID NO: 467), GI:115434472 (SEQ ID NO: 468), CeresAnnot:6252512 (SEQ ID NO: 470), CeresAnnot:1569074_Mt (SEQ ID NO: 472), CeresAnnot:1475845 (SEQ ID NO: 474), CeresAnnot:1501483 (SEQ ID NO: 476), CeresAnnot:8755079 (SEQ ID NO: 478), GI:115470147 (SEQ ID NO: 479), GI:15240905 (SEQ ID NO: 480), CeresAnnot:8755085 (SEQ ID NO: 482), GI:147853446 (SEQ ID NO: 483), GI:157346087 (SEQ ID NO: 484), CeresAnnot:1538867 (SEQ ID NO: 486), CeresAnnot:8755091 (SEQ ID NO: 488), CeresAnnot:1492702 (SEQ ID NO: 490), CeresClone:325604 (SEQ ID NO: 492), GI:108707040 (SEQ ID NO: 493), CeresAnnot:1302517_At (SEQ ID NO: 495), CeresAnnot:1355964 (SEQ ID NO: 497), CeresAnnot:8755104 (SEQ ID NO: 499), GI:147802380 (SEQ ID NO: 500), GI:510238 (SEQ ID NO: 501), GI:157341962 (SEQ ID NO: 502), GI:6635838 (SEQ ID NO: 503), GI:4455276 (SEQ ID NO: 504), CeresAnnot:8642246 (SEQ ID NO: 506), CeresAnnot:8633032 (SEQ ID NO: 508), GI:157337654 (SEQ ID NO: 509), CeresAnnot:8642241 (SEQ ID NO: 511), CeresAnnot:1520085 (SEQ ID NO: 513), CeresAnnot:1514979 (SEQ ID NO: 515), GI:147858202 (SEQ ID NO: 516), GI:125545538 (SEQ ID NO: 517), GI:115451771 (SEQ ID NO: 518), GI:125587732 (SEQ ID NO: 519), CeresAnnot:1516968 (SEQ ID NO: 521), CeresClone:350844 (SEQ ID NO: 523), CeresAnnot:8658700 (SEQ ID NO: 525), GI:157346088 (SEQ ID NO: 526), CeresClone:1926916 (SEQ ID NO: 528), GI:15226861 (SEQ ID NO: 529), CeresClone:816960 (SEQ ID NO: 531), GI:15232435 (SEQ ID NO: 532), CeresAnnot:8643789 (SEQ ID NO: 534), CeresAnnot:8631367 (SEQ ID NO: 536), GI:157339093 (SEQ ID NO: 537), CeresAnnot:8633031 (SEQ ID NO: 539), GI:125543029 (SEQ ID NO: 540), GI:115454995 (SEQ ID NO: 541), CeresAnnot:8755090 (SEQ ID NO: 543), CeresAnnot:8755097 (SEQ ID NO: 545), CeresAnnot:8755098 (SEQ ID NO: 547), CeresAnnot:8755099 (SEQ ID NO: 549), (SEQ ID NO: 550), (SEQ ID NO: 551), (SEQ ID NO: 552), CeresAnnot:6086224 (SEQ ID NO:693), CeresClone: 476769 (SEQ ID NO:695), or CeresClone:15650 (SEQ ID NO:697). In some cases, a functional homolog of SEQ ID NO: 426 has an amino acid sequence with at least 45% sequence identity, e.g., 50%, 52%, 56%, 59%, 61%, 65%, 70%, 75%, 80%, 85%, 90%, 95%, 97%, 98%, or 99% sequence identity, to the amino acid sequence set forth in SEQ ID NO: 426.

[0097] The identification of conserved regions in a biomass-modulating polypeptide facilitates production of variants of biomass-modulating polypeptides. Variants of biomass-modulating polypeptides typically have 10 or fewer conservative amino acid substitutions within the primary amino acid sequence, e.g., 7 or fewer conservative amino acid substitutions, 5 or fewer conservative amino acid substitutions, or between 1 and 5 conservative substitutions. A useful variant polypeptide can be constructed based on one of the alignments set forth in FIG. 1, FIG. 2, FIG. 3, FIG. 4, FIG. 5, FIG. 6, FIG. 7, FIG. 8, FIG. 9, FIG. 10, or FIG. 11 and/or homologs identified in the Sequence Listing. Such a polypeptide includes the conserved regions, arranged in the order depicted in the Figure from amino-terminal end to carboxy-terminal end. Such a polypeptide may also include zero, one, or more than one amino acid in positions marked by dashes. When no amino acids are present at positions marked by dashes, the length of such a polypeptide is the sum of the amino acid residues in all conserved regions. When amino acids are present at a position marked by dashes, such a polypeptide has a length that is the sum of the amino acid residues in all conserved regions and all dashes.

[0098] C. Functional Homologs Identified by HMMER

[0099] In some embodiments, useful biomass-modulating polypeptides include those that fit a Hidden Markov Model based on the polypeptides set forth in any one of FIGS. 1-11. A Hidden Markov Model (HMM) is a statistical model of a consensus sequence for a group of functional homologs. See, Durbin et al., Biological Sequence Analysis: Probabilistic Models of Proteins and Nucleic Acids, Cambridge University.

[0100] Press, Cambridge, UK (1998). An HMM is generated by the program HMMER 2.3.2 with default program parameters, using the sequences of the group of functional homologs as input. The multiple sequence alignment is generated by ProbCons (Do et al., Genome Res., 15(2):330-40 (2005)) version 1.11 using a set of default parameters: -c, —consistency REPS of 2; -ir, —iterative-refinement REPS of 100; -pre, —pre-training REPS of 0. ProbCons is a public domain software program provided by Stanford University.

[0101] The default parameters for building an HMM (hmmbuild) are as follows: the default “architecture prior” (archpri) used by MAP architecture construction is 0.85, and the default cutoff threshold (idlevel) used to determine the effective sequence number is 0.62. HMMER 2.3.2 was released Oct. 3, 2003 under a GNU general public license, and is available from various sources on the World Wide Web such as hmmer.janelia.org; hmmer.wustl.edu; and fr.com/hmmer232/. Hmmbuild outputs the model as a text file.

[0102] The HMM for a group of functional homologs can be used to determine the likelihood that a candidate biomass-modulating polypeptide sequence is a better fit to that particular HMM than to a null HMM generated using a group of sequences that are not structurally or functionally related. The likelihood that a candidate polypeptide sequence is a better fit to an HMM than to a null HMM is indicated by the HMM bit score, a number generated when the candidate sequence is fitted to the HMM profile using the HMMER hmmsearch program. The following default parameters are used when running hmmsearch: the default E-value cutoff (E) is 10.0, the default bit score cutoff (T) is negative infinity, the default number of sequences in a database (Z) is the real number of sequences in the database, the default E-value cutoff for the per-domain ranked hit list (domE) is infinity, and the default bit score cutoff for the per-domain ranked hit list (domT) is negative infinity. A high HMM bit score indicates a greater likelihood that the candidate sequence carries out one or more of the biochemical or physiological function(s) of the polypeptides used to generate the HMM. A high HMM bit score is at least 20, and often is higher. Slight variations in the HMM bit score of a particular sequence can occur due to factors such as the order in which sequences are processed for alignment by multiple sequence alignment algorithms such as the ProbCons program. Nevertheless, such HMM bit score variation is minor.

[0103] The biomass-modulating polypeptides discussed below fit the indicated HMM with an HMM bit score greater than to 65.(e.g., greater than 70, 80, 90, 100, 120, 140, 200, 300, 500, 1000, 1500, or 2000). In some embodiments, the HMM bit score of a biomass-modulating polypeptide discussed below is about 50%, 60%, 70%, 80%, 90%, or 95% of the HMM bit score of a functional homolog provided in the Sequence Listing of this application. In some embodiments, a biomass-modulating polypeptide discussed below fits the indicated HMM with an HMM bit score greater than 210, and has a domain indicative of a biomass-modulating polypeptide. In some embodiments, a biomass-modulating polypeptide discussed below fits the indicated HMM with an HMM bit score greater than 210, and has 65% or greater sequence identity (e.g., 75%, 80%, 85%, 90%, 95%, or 100% sequence identity) to an amino acid sequence shown in any one of FIGS. 1-11.

[0104] Examples of polypeptides are shown in the sequence listing that have HMM bit scores greater than 130 when fitted to an HMM generated from the amino acid sequences set forth in FIG. 1 are identified in the Sequence Listing of this application. Such polypeptides include, for example, SEQ ID NOs: 554, 556, 558, 560, 562, 563, 565, 567, 569, 571, 573, 574, 575, 577, 579, 581, 583, 585, 587, 589, 591, or 593.

[0105] Examples of polypeptides are shown in the sequence listing that have HMM bit scores greater than 340 when fitted to an HMM generated from the amino acid sequences set forth in FIG. 2 are identified in the Sequence Listing of this application. Such polypeptides include, for example, SEQ ID NOs: 263, 264, 266, 268, 269, 271, 273, 275, 276, 278, 279, 281, 282, 283, 285, 287, 289, 291, 292, 294, 295, 296, 297, 298, 299, 300, 302, 304, 305, 306, 308, 310, 311, 312, 314, 315, 317, 319, 320, or 321.

[0106] Examples of polypeptides are shown in the sequence listing that have HMM bit scores greater than 530 when fitted to an HMM generated from the amino acid sequences set forth in FIG. 3 are identified in the Sequence Listing of this application. Such polypeptides include, for example, SEQ ID NOs: 117, 118, 120, 121, 122, 123, 125, 127, 129, 131, 132, 133, 135, 137, 139, 141, 142, 144, 145, 146, 147, 149, 151, 152, 153, 154, 155, 156, 158, 160, 162, 163, 164, 166, 168, 169, 171, 173, 174, 176, 178, 180, 182, 184, 185, 186, 188, 189, 190, 191, 193, 194, 195, 196, 198, 200, 202, 203, 204, 206, or 207.

[0107] Examples of polypeptides are shown in the sequence listing that have HMM bit scores greater than 120 when fitted to an HMM generated from the amino acid sequences set forth in FIG. 4 are identified in the Sequence Listing of this application. Such polypeptides include, for example, SEQ ID NOs: 1, 2, 4, 6, 8, 10, 11, 12, 13, 14, 15, 16, 17, 18, 20, 22, 24, 25, 27, 29, 30, 32, 33, 34, 36, 37, 38, 39, 40, 41, 43, 45, 47, 49, 50, 51, 53, 54, 56, 58, 59, 61, 63, 64, 66, 68, 70, 71, 72, 74, or 75.

[0108] Examples of polypeptides are shown in the sequence listing that have HMM bit scores greater than 635 when fitted to an HMM generated from the amino acid sequences set forth in FIG. 5 are identified in the Sequence Listing of this application. Such polypeptides include, for example, SEQ ID NOs: 645, 647, 649, 651, 652, 653, 655, 657, 659, 660, 662, 664, 666, 667, 669, 670, 671, 672, 673, 674, 675, 676, 677, or 689.

[0109] Examples of polypeptides are shown in the sequence listing that have HMM bit scores greater than 65 when fitted to an HMM generated from the amino acid sequences set forth in FIG. 6 are identified in the Sequence Listing of this application. Such polypeptides include, for example, SEQ ID NOs: 255, 257, 259, or 261.

[0110] Examples of polypeptides are shown in the sequence listing that have HMM bit scores greater than 100 when fitted to an HMM generated from the amino acid sequences set forth in FIG. 7 are identified in the Sequence Listing of this application. Such polypeptides include, for example, SEQ ID NOs: 323, 324, 326, 327, 329, 331, 332, 334, 336, 337, 338, 340, 342, 343, 345, 347, 349, 351, 353, 354, 356, 357, 359, 361, 363, 365, 367, 369, 371, 372, 374, 376, 378, 380, 382, 384, 386, 388, 390, 391, 393, 395, 397, 399, 401, 403, 405, 406, 407, 409, 411, 413, 415, 416, 417, 418, 420, 421, 422, or 424.

[0111] Examples of polypeptides are shown in the sequence listing that have HMM bit scores greater than 480 when fitted to an HMM generated from the amino acid sequences set forth in FIG. 8 are identified in the Sequence Listing of this application. Such polypeptides include, for example, SEQ ID NOs: 595, 597, 598, 600, 602, 603, 604, 605, 606, 608, 609, 610, 611, 613, 615, 616, 618, 619, 620, 622, 623, 625, 627, 629, 630, 632, 633, 634, 636, 637, 638, 639, 641, 642, 643, or 691.

[0112] Examples of polypeptides are shown in the sequence listing that have HMM bit scores greater than 145 when fitted to an HMM generated from the amino acid sequences set forth in FIG. 9 are identified in the Sequence Listing of this application. Such polypeptides include, for example, SEQ ID NOs: 77, 79, 81, 82, 84, 86, 87, 88, 90, 92, 94, 96, 98, 100, 102, 104, 106, 108, 110, 112, 114, or 115.

[0113] Examples of polypeptides are shown in the sequence listing that have HMM bit scores greater than 280 when fitted to an HMM generated from the amino acid sequences set forth in FIG. 10 are identified in the Sequence Listing of this application. Such polypeptides include, for example, SEQ ID NOs: 209, 210, 212, 214, 216, 218, 220, 222, 224, 226, 228, 230, 232, 234, 236, 238, 239, 241, 242, 243, 244, 245, 246, 247, 248, 249, 250, or 251.

[0114] Examples of polypeptides are shown in the sequence listing that have HMM bit scores greater than 1000 when fitted to an HMM generated from the amino acid sequences set forth in FIG. 11 are identified in the Sequence Listing of this application. Such polypeptides include, for example, SEQ ID NOs: 426, 428, 429, 430, 431, 433, 435, 436, 437, 438, 439, 440, 442, 444, 446, 447, 448, 449, 450, 452, 453, 454, 455, 456, 457, 459, 461, 463, 464, 466, 467, 468, 470, 472, 474, 476, 478, 479, 480, 482, 483, 484, 486, 488, 490, 492, 493, 495, 497, 499, 500, 501, 502, 503, 504, 506, 508, 509, 511, 513, 515, 516, 517, 518, 519, 521, 523, 525, 526, 528, 529, 531, 532, 534, 536, 537, 539, 540, 541, 543, 545, 547, 549, 550, 551, 552, 693, 695, or 697.

[0115] D. Percent Identity

[0116] In some embodiments, a biomass-modulating polypeptide has an amino acid sequence with at least 45% sequence identity, e.g., 50%, 52%, 56%, 59%, 61%, 65%, 70%, 75%, 80%, 85%, 90%, 95%, 97%, 98%, or 99% sequence identity, to one of the amino acid sequences set forth in SEQ ID NOs: 1, 2, 4, 6, 8, 10, 11, 12, 13, 14, 15, 16, 17, 18, 20, 22, 24, 25, 27, 29, 30, 32, 33, 34, 36, 37, 38, 39, 40, 41, 43, 45, 47, 49, 50, 51, 53, 54, 56, 58, 59, 61, 63, 64, 66, 68, 70, 71, 72, 74, 75, 77, 79, 81, 82, 84, 86, 87, 88, 90, 92, 94, 96, 98, 100, 102, 104, 106, 108, 110, 112, 114, 115, 117, 118, 120, 121, 122, 123, 125, 127, 129, 131, 132, 133, 135, 137, 139, 141, 142, 144, 145, 146, 147, 149, 151, 152, 153, 154, 155, 156, 158, 160, 162, 163, 164, 166, 168, 169, 171, 173, 174, 176, 178, 180, 182, 184, 185, 186, 188, 189, 190, 191, 193, 194, 195, 196, 198, 200, 202, 203, 204, 206, 207, 209, 210, 212, 214, 216, 218, 220, 222, 224, 226, 228, 230, 232, 234, 236, 238, 239, 241, 242, 243, 244, 245, 246, 247, 248, 249, 250, 251, 253, 255, 257, 259, 261, 263, 264, 266, 268, 269, 271, 273, 275, 276, 278, 279, 281, 282, 283, 285, 287, 289, 291, 292, 294, 295, 296, 297, 298, 299, 300, 302, 304, 305, 306, 308, 310, 311, 312, 314, 315, 317, 319, 320, 321, 323, 324, 326, 327, 329, 331, 332, 334, 336, 337, 338, 340, 342, 343, 345, 347, 349, 351, 353, 354, 356, 357, 359, 361, 363, 365, 367, 369, 371, 372, 374, 376, 378, 380, 382, 384, 386, 388, 390, 391, 393, 395, 397, 399, 401, 403, 405, 406, 407, 409, 411, 413, 415, 416, 417, 418, 420, 421, 422, 424, 426, 428, 429, 430, 431, 433, 435, 436, 437, 438, 439, 440, 442, 444, 446, 447, 448, 449, 450, 452, 453, 454, 455, 456, 457, 459, 461, 463, 464, 466, 467, 468, 470, 472, 474, 476, 478, 479, 480, 482, 483, 484, 486, 488, 490, 492, 493, 495, 497, 499, 500, 501, 502, 503, 504, 506, 508, 509, 511, 513, 515, 516, 517, 518, 519, 521, 523, 525, 526, 528, 529, 531, 532, 534, 536, 537, 539, 540, 541, 543, 545, 547, 549, 550, 551, 552, 554, 556, 558, 560, 562, 563, 565, 567, 569, 571, 573, 574, 575, 577, 579, 581, 583, 585, 587, 589, 591, 593, 595, 597, 598, 600, 602, 603, 604, 605, 606, 608, 609, 610, 611, 613, 615, 616, 618, 619, 620, 622, 623, 625, 627, 629, 630, 632, 633, 634, 636, 637, 638, 639, 641, 642, 643, 645, 647, 649, 651, 652, 653, 655, 657, 659, 660, 662, 664, 666, 667, 669, 670, 671, 672, 673, 674, 675, 676, 677, 689, 691, 693, 695, or 697. Polypeptides having such a percent sequence identity often have a domain indicative of a biomass-modulating polypeptide and/or have an HMM bit score that is greater than 65, as discussed above. Amino acid sequences of biomass-modulating polypeptides having at least 80% sequence identity to one of the amino acid sequences set forth in SEQ ID NOs: 1, 2, 4, 6, 8, 10, 11, 12, 13, 14, 15, 16, 17, 18, 20, 22, 24, 25, 27, 29, 30, 32, 33, 34, 36, 37, 38, 39, 40, 41, 43, 45, 47, 49, 50, 51, 53, 54, 56, 58, 59, 61, 63, 64, 66, 68, 70, 71, 72, 74, 75, 77, 79, 81, 82, 84, 86, 87, 88, 90, 92, 94, 96, 98, 100, 102, 104, 106, 108, 110, 112, 114, 115, 117, 118, 120, 121, 122, 123, 125, 127, 129, 131, 132, 133, 135, 137, 139, 141, 142, 144, 145, 146, 147, 149, 151, 152, 153, 154, 155, 156, 158, 160, 162, 163, 164, 166, 168, 169, 171, 173, 174, 176, 178, 180, 182, 184, 185, 186, 188, 189, 190, 191, 193, 194, 195, 196, 198, 200, 202, 203, 204, 206, 207, 209, 210, 212, 214, 216, 218, 220, 222, 224, 226, 228, 230, 232, 234, 236, 238, 239, 241, 242, 243, 244, 245, 246, 247, 248, 249, 250, 251, 253, 255, 257, 259, 261, 263, 264, 266, 268, 269, 271, 273, 275, 276, 278, 279, 281, 282, 283, 285, 287, 289, 291, 292, 294, 295, 296, 297, 298, 299, 300, 302, 304, 305, 306, 308, 310, 311, 312, 314, 315, 317, 319, 320, 321, 323, 324, 326, 327, 329, 331, 332, 334, 336, 337, 338, 340, 342, 343, 345, 347, 349, 351, 353, 354, 356, 357, 359, 361, 363, 365, 367, 369, 371, 372, 374, 376, 378, 380, 382, 384, 386, 388, 390, 391, 393, 395, 397, 399, 401, 403, 405, 406, 407, 409, 411, 413, 415, 416, 417, 418, 420, 421, 422, 424, 426, 428, 429, 430, 431, 433, 435, 436, 437, 438, 439, 440, 442, 444, 446, 447, 448, 449, 450, 452, 453, 454, 455, 456, 457, 459, 461, 463, 464, 466, 467, 468, 470, 472, 474, 476, 478, 479, 480, 482, 483, 484, 486, 488, 490, 492, 493, 495, 497, 499, 500, 501, 502, 503, 504, 506, 508, 509, 511, 513, 515, 516, 517, 518, 519, 521, 523, 525, 526, 528, 529, 531, 532, 534, 536, 537, 539, 540, 541, 543, 545, 547, 549, 550, 551, 552, 554, 556, 558, 560, 562, 563, 565, 567, 569, 571, 573, 574, 575, 577, 579, 581, 583, 585, 587, 589, 591, 593, 595, 597, 598, 600, 602, 603, 604, 605, 606, 608, 609, 610, 611, 613, 615, 616, 618, 619, 620, 622, 623, 625, 627, 629, 630, 632, 633, 634, 636, 637, 638, 639, 641, 642, 643, 645, 647, 649, 651, 652, 653, 655, 657, 659, 660, 662, 664, 666, 667, 669, 670, 671, 672, 673, 674, 675, 676, 677, 689, 691, 693, 695, or 697 are provided in FIGS. 1-11 and in the Sequence Listing.

[0117] “Percent sequence identity” refers to the degree of sequence identity between any given reference sequence, e.g., SEQ ID NO: 1, and a candidate biomass-modulating sequence. A candidate sequence typically has a length that is from 80 percent to 200 percent of the length of the reference sequence, e.g., 82, 85, 87, 89, 90, 93, 95, 97, 99, 100, 105, 110, 115, 120, 130, 140, 150, 160, 170, 180, 190, or 200 percent of the length of the reference sequence. A percent identity for any candidate nucleic acid or polypeptide relative to a reference nucleic acid or polypeptide can be determined as follows. A reference sequence (e.g., a nucleic acid sequence or an amino acid sequence) is aligned to one or more candidate sequences using the computer program ClustalW (version 1.83, default parameters), which allows alignments of nucleic acid or polypeptide sequences to be carried out across their entire length (global alignment). Chema et al., Nucleic Acids Res., 31(13):3497-500 (2003).

[0118] ClustalW calculates the best match between a reference and one or more candidate sequences, and aligns them so that identities, similarities and differences can be determined. Gaps of one or more residues can be inserted into a reference sequence, a candidate sequence, or both, to maximize sequence alignments. For fast pairwise alignment of nucleic acid sequences, the following default parameters are used: word size: 2; window size: 4; scoring method: percentage; number of top diagonals: 4; and gap penalty: 5. For multiple alignment of nucleic acid sequences, the following parameters are used: gap opening penalty: 10.0; gap extension penalty: 5.0; and weight transitions: yes. For fast pairwise alignment of protein sequences, the following parameters are used: word size: 1; window size: 5; scoring method: percentage; number of top diagonals: 5; gap penalty: 3. For multiple alignment of protein sequences, the following parameters are used: weight matrix: blosum; gap opening penalty: 10.0; gap extension penalty: 0.05; hydrophilic gaps: on; hydrophilic residues: Gly, Pro, Ser, Asn, Asp, Gln, Glu, Arg, and Lys; residue-specific gap penalties: on. The ClustalW output is a sequence alignment that reflects the relationship between sequences. ClustalW can be run, for example, at the Baylor College of Medicine Search Launcher site on the World Wide Web (searchlauncher.bcm.tmc.edu/multi-align/multi-align.html) and at the European Bioinformatics Institute site on the World Wide Web (ebi.ac.uk/clustalw).

[0119] To determine percent identity of a candidate nucleic acid or amino acid sequence to a reference sequence, the sequences are aligned using ClustalW, the number of identical matches in the alignment is divided by the length of the reference sequence, and the result is multiplied by 100. It is noted that the percent identity value can be rounded to the nearest tenth. For example, 78.11, 78.12, 78.13, and 78.14 are rounded down to 78.1, while 78.15, 78.16, 78.17, 78.18, and 78.19 are rounded up to 78.2.

[0120] In some cases, a biomass-modulating polypeptide has an amino acid sequence with at least 45% sequence identity, e.g., 50%, 52%, 56%, 59%, 61%, 65%, 70%, 75%, 80%, 85%, 90%, 95%, 97%, 98%, or 99% sequence identity, to the amino acid sequence set forth in SEQ ID NO: 554. Amino acid sequences of polypeptides having greater than 45% sequence identity to the polypeptide set forth in SEQ ID NO: 554 are provided in FIG. 1 and in the Sequence Listing.

[0121] In some cases, a biomass-modulating polypeptide has an amino acid sequence with at least 45% sequence identity, e.g., 50%, 52%, 56%, 59%, 61%, 65%, 70%, 75%, 80%, 85%, 90%, 95%, 97%, 98%, or 99% sequence identity, to the amino acid sequence set forth in SEQ ID NO: 263. Amino acid sequences of polypeptides having greater than 45% sequence identity to the polypeptide set forth in SEQ ID NO: 263 are provided in FIG. 2 and in the Sequence Listing.

[0122] In some cases, a biomass-modulating polypeptide has an amino acid sequence with at least 45% sequence identity, e.g., 50%, 52%, 56%, 59%, 61%, 65%, 70%, 75%, 80%, 85%, 90%, 95%, 97%, 98%, or 99% sequence identity, to the amino acid sequence set forth in SEQ ID NO: 117. Amino acid sequences of polypeptides having greater than 45% sequence identity to the polypeptide set forth in SEQ ID NO: 117 are provided in FIG. 3 and in the Sequence Listing.

[0123] In some cases, a biomass-modulating polypeptide has an amino acid sequence with at least 45% sequence identity, e.g., 50%, 52%, 56%, 59%, 61%, 65%, 70%, 75%, 80%, 85%, 90%, 95%, 97%, 98%, or 99% sequence identity, to the amino acid sequence set forth in SEQ ID NO: 1. Amino acid sequences of polypeptides having greater than 45% sequence identity to the polypeptide set forth in SEQ ID NO: 1 are provided in FIG. 4 and in the Sequence Listing.

[0124] In some cases, a biomass-modulating polypeptide has an amino acid sequence with at least 45% sequence identity, e.g., 50%, 52%, 56%, 59%, 61%, 65%, 70%, 75%, 80%, 85%, 90%, 95%, 97%, 98%, or 99% sequence identity, to the amino acid sequence set forth in SEQ ID NO: 645. Amino acid sequences of polypeptides having greater than 45% sequence identity to the polypeptide set forth in SEQ ID NO: 645 are provided in FIG. 5 and in the Sequence Listing.

[0125] In some cases, a biomass-modulating polypeptide has an amino acid sequence with at least 45% sequence identity, e.g., 50%, 52%, 56%, 59%, 61%, 65%, 70%, 75%, 80%, 85%, 90%, 95%, 97%, 98%, or 99% sequence identity, to the amino acid sequence set forth in SEQ ID NO: 253. Amino acid sequences of polypeptides having greater than 45% sequence identity to the polypeptide set forth in SEQ ID NO: 253 are provided in FIG. 6 and in the Sequence Listing.

[0126] In some cases, a biomass-modulating polypeptide has an amino acid sequence with at least 45% sequence identity, e.g., 50%, 52%, 56%, 59%, 61%, 65%, 70%, 75%, 80%, 85%, 90%, 95%, 97%, 98%, or 99% sequence identity, to the amino acid sequence set forth in SEQ ID NO: 323. Amino acid sequences of polypeptides having greater than 45% sequence identity to the polypeptide set forth in SEQ ID NO: 323 are provided in FIG. 7 and in the Sequence Listing.

[0127] In some cases, a biomass-modulating polypeptide has an amino acid sequence with at least 45% sequence identity, e.g., 50%, 52%, 56%, 59%, 61%, 65%, 70%, 75%, 80%, 85%, 90%, 95%, 97%, 98%, or 99% sequence identity, to the amino acid sequence set forth in SEQ ID NO: 595. Amino acid sequences of polypeptides having greater than 45% sequence identity to the polypeptide set forth in SEQ ID NO: 595 are provided in FIG. 8 and in the Sequence Listing.

[0128] In some cases, a biomass-modulating polypeptide has an amino acid sequence with at least 45% sequence identity, e.g., 50%, 52%, 56%, 59%, 61%, 65%, 70%, 75%, 80%, 85%, 90%, 95%, 97%, 98%, or 99% sequence identity, to the amino acid sequence set forth in SEQ ID NO: 77. Amino acid sequences of polypeptides having greater than 45% sequence identity to the polypeptide set forth in SEQ ID NO: 77 are provided in FIG. 9 and in the Sequence Listing.

[0129] In some cases, a biomass-modulating polypeptide has an amino acid sequence with at least 45% sequence identity, e.g., 50%, 52%, 56%, 59%, 61%, 65%, 70%, 75%, 80%, 85%, 90%, 95%, 97%, 98%, or 99% sequence identity, to the amino acid sequence set forth in SEQ ID NO: 209. Amino acid sequences of polypeptides having greater than 45% sequence identity to the polypeptide set forth in SEQ ID NO: 209 are provided in FIG. 10 and in the Sequence Listing.

[0130] In some cases, a biomass-modulating polypeptide has an amino acid sequence with at least 45% sequence identity, e.g., 50%, 52%, 56%, 59%, 61%, 65%, 70%, 75%, 80%, 85%, 90%, 95%, 97%, 98%, or 99% sequence identity, to the amino acid sequence set forth in SEQ ID NO: 426. Amino acid sequences of polypeptides having greater than 45% sequence identity to the polypeptide set forth in SEQ ID NO: 426 are provided in FIG. 11 and in the Sequence Listing.

[0131] E. Other Sequences

[0132] It should be appreciated that a biomass-modulating polypeptide can include additional amino acids that are not involved in biomass modulation, and thus such a polypeptide can be longer than would otherwise be the case. For example, a biomass-modulating polypeptide can include a purification tag, a chloroplast transit peptide, a mitochondrial transit peptide, an amyloplast peptide, or a leader sequence added to the amino or carboxy terminus. In some embodiments, a biomass-modulating polypeptide includes an amino acid sequence that functions as a reporter, e.g., a green fluorescent protein or yellow fluorescent protein.

### III. NUCLEIC ACIDS

[0133] Nucleic acids described herein include nucleic acids that are effective to modulate biomass levels when transcribed in a plant or plant cell. Such nucleic acids include, without limitation, those that encode a biomass-modulating polypeptide and those that can be used to inhibit expression of a biomass-modulating polypeptide via a nucleic acid based method.

[0134] A. Nucleic acids encoding biomass-modulating polypeptides

[0135] Nucleic acids encoding biomass-modulating polypeptides are described herein. Examples of such nucleic acids include SEQ ID NOs: 3, 5, 7, 9, 19, 21, 23, 26, 28, 31, 35, 42, 44, 46, 48, 52, 55, 57, 60, 62, 65, 67, 69, 73, 76, 78, 80, 83, 85, 89, 91, 93, 95, 97, 99, 101, 103, 105, 107, 109, 111, 113, 116, 119, 124, 126, 128, 130, 134, 136, 138, 140, 143, 148, 150, 157, 159, 161, 165, 167, 170, 172, 175, 177, 179, 181, 183, 187, 192, 197, 199, 201, 205, 208, 211, 213, 215, 217, 219, 221, 223, 225, 227, 229, 231, 233, 235, 237, 240, 252, 254, 256, 258, 260, 262, 265, 267, 270, 272, 274, 277, 280, 284, 286, 288, 290, 293, 301, 303, 307, 309, 313, 316, 318, 322, 325, 328, 330, 333, 335, 339, 341, 344, 346, 348, 350, 352, 355, 358, 360, 362, 364, 366, 368, 370, 373, 375, 377, 379, 381, 383, 385, 387, 389, 392, 394, 396, 398, 400, 402, 404, 408, 410, 412, 414, 419, 423, 425, 427, 432, 434, 441, 443, 445, 451, 458, 460, 462, 465, 469, 471, 473, 475, 477, 481, 485, 487, 489, 491, 494, 496, 498, 505, 507, 510, 512, 514, 520, 522, 524, 527, 530, 533, 535, 538, 542, 544, 546, 548, 553, 555, 557, 559, 561, 564, 566, 568, 570, 572, 576, 578, 580, 582, 584, 586, 588, 590, 592, 594, 596, 599, 601, 607, 612, 614, 617, 621, 624, 626, 628, 631, 635, 640, 644, 646, 648, 650, 654, 656, 658, 661, 663, 665, 668, 678, 679, 680, 681, 682, 683, 684, 685, 686, 687, 688, 690, 692, 694, or 696 as described in more detail below. A nucleic acid also can be a fragment that is at least 40% (e.g., at least 45, 50, 55, 60, 65, 70, 75, 80, 85, 90, 95, or 99%) of the length of the full-length nucleic acid set forth in SEQ ID NOs: 3, 5, 7, 9, 19, 21, 23, 26, 28, 31, 35, 42, 44, 46, 48, 52, 55, 57, 60, 62, 65, 67, 69, 73, 76, 78, 80, 83, 85, 89, 91, 93, 95, 97, 99, 101, 103, 105, 107, 109, 111, 113, 116, 119, 124, 126, 128, 130, 134, 136, 138, 140, 143, 148, 150, 157, 159, 161, 165, 167, 170, 172, 175, 177, 179, 181, 183, 187, 192, 197, 199, 201, 205, 208, 211, 213, 215, 217, 219, 221, 223, 225, 227, 229, 231, 233, 235, 237, 240, 252, 254, 256, 258, 260, 262, 265, 267, 270, 272, 274, 277, 280, 284, 286, 288, 290, 293, 301, 303, 307, 309, 313, 316, 318, 322, 325, 328, 330, 333, 335, 339, 341, 344, 346, 348, 350, 352, 355, 358, 360, 362, 364, 366, 368, 370, 373, 375, 377, 379, 381, 383, 385, 387, 389, 392, 394, 396, 398, 400, 402, 404, 408, 410, 412, 414, 419, 423, 425, 427, 432, 434, 441, 443, 445, 451, 458, 460, 462, 465, 469, 471, 473, 475, 477, 481, 485, 487, 489, 491, 494, 496, 498, 505, 507, 510, 512, 514, 520, 522, 524, 527, 530, 533, 535, 538, 542, 544, 546, 548, 553, 555, 557, 559, 561, 564, 566, 568, 570, 572, 576, 578, 580, 582, 584, 586, 588, 590, 592, 594, 596, 599, 601, 607, 612, 614, 617, 621, 624, 626, 628, 631, 635, 640, 644, 646, 648, 650, 654, 656, 658, 661, 663, 665, 668, 678, 679, 680, 681, 682, 683, 684, 685, 686, 687, 688, 690, 692, 694, or 696.

[0136] A biomass-modulating nucleic acid can comprise the nucleotide sequence set forth in SEQ ID NO: 553. Alternatively, a biomass-modulating nucleic acid can be a variant of the nucleic acid having the nucleotide sequence set forth in SEQ ID NO: 553. For example, a biomass-modulating nucleic acid can have a nucleotide sequence with at least 80% sequence identity, e.g., 81%, 85%, 90%, 95%, 97%, 98%, or 99% sequence identity, to the nucleotide sequence set forth in SEQ ID NO: 553. A biomass-modulating nucleic acid can comprise the nucleotide sequence set forth in SEQ ID NO: 262. Alternatively, a biomass-modulating nucleic acid can be a variant of the nucleic acid having the nucleotide sequence set forth in SEQ ID NO: 262. For example, a biomass-modulating nucleic acid can have a nucleotide sequence with at least 80% sequence identity, e.g., 81%, 85%, 90%, 95%, 97%, 98%, or 99% sequence identity, to the nucleotide sequence set forth in SEQ ID NO: 262.

[0137] A biomass-modulating nucleic acid can comprise the nucleotide sequence set forth in SEQ ID NO: 116. Alternatively, a biomass-modulating nucleic acid can be a variant of the nucleic acid having the nucleotide sequence set forth in SEQ ID NO: 116. For example, a biomass-modulating nucleic acid can have a nucleotide sequence with at least 80% sequence identity, e.g., 81%, 85%, 90%, 95%, 97%, 98%, or 99% sequence identity, to the nucleotide sequence set forth in SEQ ID NO: 116.

[0138] A biomass-modulating nucleic acid can comprise the nucleotide sequence set forth in SEQ ID NO: 678. Alternatively, a biomass-modulating nucleic acid can be a variant of the nucleic acid having the nucleotide sequence set forth in SEQ ID NO: 678. For example, a biomass-modulating nucleic acid can have a nucleotide sequence with at least 80% sequence identity, e.g., 81%, 85%, 90%, 95%, 97%, 98%, or 99% sequence identity, to the nucleotide sequence set forth in SEQ ID NO: 678.

[0139] A biomass-modulating nucleic acid can comprise the nucleotide sequence set forth in SEQ ID NO: 644. Alternatively, a biomass-modulating nucleic acid can be a variant of the nucleic acid having the nucleotide sequence set forth in SEQ ID NO: 644. For example, a biomass-modulating nucleic acid can have a nucleotide sequence with at least 80% sequence identity, e.g., 81%, 85%, 90%, 95%, 97%, 98%, or 99% sequence identity, to the nucleotide sequence set forth in SEQ ID NO: 644. A biomass-modulating nucleic acid can comprise the nucleotide sequence set forth in SEQ ID NO: 252. Alternatively, a biomass-modulating nucleic acid can be a variant of the nucleic acid having the nucleotide sequence set forth in SEQ ID NO: 252. For example, a biomass-modulating nucleic acid can have a nucleotide sequence with at least 80% sequence identity, e.g., 81%, 85%, 90%, 95%, 97%, 98%, or 99% sequence identity, to the nucleotide sequence set forth in SEQ ID NO: 252.

[0140] A biomass-modulating nucleic acid can comprise the nucleotide sequence set forth in SEQ ID NO: 322. Alternatively, a biomass-modulating nucleic acid can be a variant of the nucleic acid having the nucleotide sequence set forth in SEQ ID NO: 322. For example, a biomass-modulating nucleic acid can have a nucleotide sequence with at least 80% sequence identity, e.g., 81%, 85%, 90%, 95%, 97%, 98%, or 99% sequence identity, to the nucleotide sequence set forth in SEQ ID NO: 322.

[0141] A biomass-modulating nucleic acid can comprise the nucleotide sequence set forth in SEQ ID NO: 594. Alternatively, a biomass-modulating nucleic acid can be a variant of the nucleic acid having the nucleotide sequence set forth in SEQ ID NO: 594. For example, a biomass-modulating nucleic acid can have a nucleotide sequence with at least 80% sequence identity, e.g., 81%, 85%, 90%, 95%, 97%, 98%, or 99% sequence identity, to the nucleotide sequence set forth in SEQ ID NO: 594.

[0142] A biomass-modulating nucleic acid can comprise the nucleotide sequence set forth in SEQ ID NO: 76. Alternatively, a biomass-modulating nucleic acid can be a variant of the nucleic acid having the nucleotide sequence set forth in SEQ ID NO: 76. For example, a biomass-modulating nucleic acid can have a nucleotide sequence with at least 80% sequence identity, e.g., 81%, 85%, 90%, 95%, 97%, 98%, or 99% sequence identity, to the nucleotide sequence set forth in SEQ ID NO: 76.

[0143] A biomass-modulating nucleic acid can comprise the nucleotide sequence set forth in SEQ ID NO: 208. Alternatively, a biomass-modulating nucleic acid can be a variant of the nucleic acid having the nucleotide sequence set forth in SEQ ID NO: 208. For example, a biomass-modulating nucleic acid can have a nucleotide sequence with at least 80% sequence identity, e.g., 81%, 85%, 90%, 95%, 97%, 98%, or 99% sequence identity, to the nucleotide sequence set forth in SEQ ID NO: 208.

[0144] A biomass-modulating nucleic acid can comprise the nucleotide sequence set forth in SEQ ID NO: 425. Alternatively, a biomass-modulating nucleic acid can be a variant of the nucleic acid having the nucleotide sequence set forth in SEQ ID NO: 425. For example, a biomass-modulating nucleic acid can have a nucleotide sequence with at least 80% sequence identity, e.g., 81%, 85%, 90%, 95%, 97%, 98%, or 99% sequence identity, to the nucleotide sequence set forth in SEQ ID NO: 425.

[0145] Isolated nucleic acid molecules can be produced by standard techniques. For example, polymerase chain reaction (PCR) techniques can be used to obtain an isolated nucleic acid containing a nucleotide sequence described herein. PCR can be used to amplify specific sequences from DNA as well as RNA, including sequences from total genomic DNA or total cellular RNA. Various PCR methods are described, for example, in PCR Primer: A Laboratory Manual, Dieffenbach and Dveksler, eds., Cold Spring Harbor Laboratory Press, 1995. Generally, sequence information from the ends of the region of interest or beyond is employed to design oligonucleotide primers that are identical or similar in sequence to opposite strands of the template to be amplified. Various PCR strategies also are available by which site-specific nucleotide sequence modifications can be introduced into a template nucleic acid. Isolated nucleic acids also can be chemically synthesized, either as a single nucleic acid molecule (e.g., using automated DNA synthesis in the 3′ to 5′ direction using phosphoramidite technology) or as a series of oligonucleotides. For example, one or more pairs of long oligonucleotides (e.g., >100 nucleotides) can be synthesized that contain the desired sequence, with each pair containing a short segment of complementarity (e.g., about 15 nucleotides) such that a duplex is formed when the oligonucleotide pair is annealed. DNA polymerase is used to extend the oligonucleotides, resulting in a single, double-stranded nucleic acid molecule per oligonucleotide pair, which then can be ligated into a vector. Isolated nucleic acids of the invention also can be obtained by mutagenesis of, e.g., a naturally occurring DNA.

[0146] B. Use of Nucleic Acids to Modulate Expression of Polypeptides

[0147] i. Expression of a Biomass-Modulating Polypeptide

[0148] A nucleic acid encoding one of the biomass-modulating polypeptides described herein can be used to express the polypeptide in a plant species of interest, typically by transforming a plant cell with a nucleic acid having the coding sequence for the polypeptide operably linked in sense orientation to one or more regulatory regions. It will be appreciated that because of the degeneracy of the genetic code, a number of nucleic acids can encode a particular biomass-modulating polypeptide; i.e., for many amino acids, there is more than one nucleotide triplet that serves as the codon for the amino acid. Thus, codons in the coding sequence for a given biomass-modulating polypeptide can be modified such that optimal expression in a particular plant species is obtained, using appropriate codon bias tables for that species.

[0149] In some cases, expression of a biomass-modulating polypeptide inhibits one or more functions of an endogenous polypeptide. For example, a nucleic acid that encodes a dominant negative polypeptide can be used to inhibit protein function. A dominant negative polypeptide typically is mutated or truncated relative to an endogenous wild type polypeptide, and its presence in a cell inhibits one or more functions of the wild type polypeptide in that cell, i.e., the dominant negative polypeptide is genetically dominant and confers a loss of function. The mechanism by which a dominant negative polypeptide confers such a phenotype can vary but often involves a protein-protein interaction or a protein-DNA interaction. For example, a dominant negative polypeptide can be an enzyme that is truncated relative to a native wild type enzyme, such that the truncated polypeptide retains domains involved in binding a first protein but lacks domains involved in binding a second protein. The truncated polypeptide is thus unable to properly modulate the activity of the second protein. See, e.g., US 2007/0056058. As another example, a point mutation that results in a non-conservative amino acid substitution in a catalytic domain can result in a dominant negative polypeptide. See, e.g., US 2005/032221. As another example, a dominant negative polypeptide can be a transcription factor that is truncated relative to a native wild type transcription factor, such that the truncated polypeptide retains the DNA binding domain(s) but lacks the activation domain(s). Such a truncated polypeptide can inhibit the wild type transcription factor from binding DNA, thereby inhibiting transcription activation.

[0150] ii. Inhibition of Expression of a Biomass-Modulating Polypeptide

[0151] Polynucleotides and recombinant constructs described herein can be used to inhibit expression of a biomass-modulating polypeptide in a plant species of interest. See, e.g., Matzke and Birchler, Nature Reviews Genetics 6:24-35 (2005); Akashi et al., Nature Reviews Mol. Cell. Biology 6:413-422 (2005); Mittal, Nature Reviews Genetics 5:355-365 (2004); and Nature Reviews RNA interference collection, October 2005 on the World Wide Web at nature.com/reviews/focus/mai. A number of nucleic acid based methods, including antisense RNA, ribozyme directed RNA cleavage, post-transcriptional gene silencing (PTGS), e.g., RNA interference (RNAi), and transcriptional gene silencing (TGS) are known to inhibit gene expression in plants. Suitable polynucleotides include full-length nucleic acids encoding biomass-modulating polypeptides or fragments of such full-length nucleic acids. In some embodiments, a complement of the full-length nucleic acid or a fragment thereof can be used. Typically, a fragment is at least 10 nucleotides, e.g., at least 12, 13, 14, 15, 16, 17, 18, 19, 20, 21, 22, 23, 24, 25, 26, 27, 30, 35, 40, 50, 80, 100, 200, 500 nucleotides or more. Generally, higher homology can be used to compensate for the use of a shorter sequence.

[0152] Antisense technology is one well-known method. In this method, a nucleic acid of a gene to be repressed is cloned and operably linked to a regulatory region and a transcription termination sequence so that the antisense strand of RNA is transcribed. The recombinant construct is then transformed into plants, as described herein, and the antisense strand of RNA is produced. The nucleic acid need not be the entire sequence of the gene to be repressed, but typically will be substantially complementary to at least a portion of the sense strand of the gene to be repressed.

[0153] In another method, a nucleic acid can be transcribed into a ribozyme, or catalytic RNA, that affects expression of an mRNA. See, U.S. Pat. No. 6,423,885. Ribozymes can be designed to specifically pair with virtually any target RNA and cleave the phosphodiester backbone at a specific location, thereby functionally inactivating the target RNA. Heterologous nucleic acids can encode ribozymes designed to cleave particular mRNA transcripts, thus preventing expression of a polypeptide. Hammerhead ribozymes are useful for destroying particular mRNAs, although various ribozymes that cleave mRNA at site-specific recognition sequences can be used. Hammerhead ribozymes cleave mRNAs at locations dictated by flanking regions that form complementary base pairs with the target mRNA. The sole requirement is that the target RNA contains a 5′-UG-3′ nucleotide sequence. The construction and production of hammerhead ribozymes is known in the art. See, for example, U.S. Pat. No. 5,254,678 and WO 02/46449 and references cited therein. Hammerhead ribozyme sequences can be embedded in a stable RNA such as a transfer RNA (tRNA) to increase cleavage efficiency in vivo. Perriman et al., Proc. Natl. Acad. Sci. USA, 92(13):6175-6179 (1995); de Feyter and Gaudron, Methods in Molecular Biology, Vol. 74, Chapter 43, “Expressing Ribozymes in Plants”, Edited by Turner, P.C., Humana Press Inc., Totowa, N.J. RNA endoribonucleases which have been described, such as the one that occurs naturally in Tetrahymena thermophile, can be useful. See, for example, U.S. Pat. Nos. 4,987,071 and 6,423,885.

[0154] PTGS, e.g., RNAi, can also be used to inhibit the expression of a gene. For example, a construct can be prepared that includes a sequence that is transcribed into an RNA that can anneal to itself, e.g., a double stranded RNA having a stem-loop structure. In some embodiments, one strand of the stem portion of a double stranded RNA comprises a sequence that is similar or identical to the sense coding sequence or a fragment thereof of a biomass-modulating polypeptide, and that is from about 10 nucleotides to about 2,500 nucleotides in length. The length of the sequence that is similar or identical to the sense coding sequence can be from 10 nucleotides to 500 nucleotides, from 15 nucleotides to 300 nucleotides, from 20 nucleotides to 100 nucleotides, or from 25 nucleotides to 100 nucleotides. The other strand of the stem portion of a double stranded RNA comprises a sequence that is similar or identical to the antisense strand or a fragment thereof of the coding sequence of the biomass-modulating polypeptide, and can have a length that is shorter, the same as, or longer than the corresponding length of the sense sequence. In some cases, one strand of the stem portion of a double stranded RNA comprises a sequence that is similar or identical to the 3′ or 5′ untranslated region, or a fragment thereof, of an mRNA encoding a biomass-modulating polypeptide, and the other strand of the stem portion of the double stranded RNA comprises a sequence that is similar or identical to the sequence that is complementary to the 3′ or 5′ untranslated region, respectively, or a fragment thereof, of the mRNA encoding the biomass-modulating polypeptide. In other embodiments, one strand of the stem portion of a double stranded RNA comprises a sequence that is similar or identical to the sequence of an intron, or a fragment thereof, in the pre-mRNA encoding a biomass-modulating polypeptide, and the other strand of the stem portion comprises a sequence that is similar or identical to the sequence that is complementary to the sequence of the intron, or a fragment thereof, in the pre-mRNA.

[0155] The loop portion of a double stranded RNA can be from 3 nucleotides to 5,000 nucleotides, e.g., from 3 nucleotides to 25 nucleotides, from 15 nucleotides to 1,000 nucleotides, from 20 nucleotides to 500 nucleotides, or from 25 nucleotides to 200 nucleotides. The loop portion of the RNA can include an intron or a fragment thereof. A double stranded RNA can have zero, one, two, three, four, five, six, seven, eight, nine, ten, or more stem-loop structures.

[0156] A construct including a sequence that is operably linked to a regulatory region and a transcription termination sequence, and that is transcribed into an RNA that can form a double stranded RNA, is transformed into plants as described herein. Methods for using RNAi to inhibit the expression of a gene are known to those of skill in the art. See, e.g., U.S. Pat. Nos. 5,034,323; 6,326,527; 6,452,067; 6,573,099; 6,753,139; and 6,777,588. See also WO 97/01952; WO 98/53083; WO 99/32619; WO 98/36083; and U.S. Patent Publications 20030175965, 20030175783, 20040214330, and 20030180945.

[0157] Constructs containing regulatory regions operably linked to nucleic acid molecules in sense orientation can also be used to inhibit the expression of a gene. The transcription product can be similar or identical to the sense coding sequence, or a fragment thereof, of a biomass-modulating polypeptide. The transcription product also can be unpolyadenylated, lack a 5′ cap structure, or contain an unspliceable intron. Methods of inhibiting gene expression using a full-length cDNA as well as a partial cDNA sequence are known in the art. See, e.g., U.S. Pat. No. 5,231,020.

[0158] In some embodiments, a construct containing a nucleic acid having at least one strand that is a template for both sense and antisense sequences that are complementary to each other is used to inhibit the expression of a gene. The sense and antisense sequences can be part of a larger nucleic acid molecule or can be part of separate nucleic acid molecules having sequences that are not complementary. The sense or antisense sequence can be a sequence that is identical or complementary to the sequence of an mRNA, the 3′ or 5′ untranslated region of an mRNA, or an intron in a pre-mRNA encoding a biomass-modulating polypeptide, or a fragment of such sequences. In some embodiments, the sense or antisense sequence is identical or complementary to a sequence of the regulatory region that drives transcription of the gene encoding a biomass-modulating polypeptide. In each case, the sense sequence is the sequence that is complementary to the antisense sequence.

[0159] The sense and antisense sequences can be a length greater than about 10 nucleotides (e.g., 12, 13, 14, 15, 16, 17, 18, 19, 20, 21, 22, 23, 24, 25, 26, 27, 28, 29, 30, or more nucleotides). For example, an antisense sequence can be 21 or 22 nucleotides in length. Typically, the sense and antisense sequences range in length from about 15 nucleotides to about 30 nucleotides, e.g., from about 18 nucleotides to about 28 nucleotides, or from about 21 nucleotides to about 25 nucleotides.

[0160] In some embodiments, an antisense sequence is a sequence complementary to an mRNA sequence, or a fragment thereof, encoding a biomass-modulating polypeptide described herein. The sense sequence complementary to the antisense sequence can be a sequence present within the mRNA of the biomass-modulating polypeptide. Typically, sense and antisense sequences are designed to correspond to a 15-30 nucleotide sequence of a target mRNA such that the level of that target mRNA is reduced.

[0161] In some embodiments, a construct containing a nucleic acid having at least one strand that is a template for more than one sense sequence (e.g., 2, 3, 4, 5, 6, 7, 8, 9, 10 or more sense sequences) can be used to inhibit the expression of a gene. Likewise, a construct containing a nucleic acid having at least one strand that is a template for more than one antisense sequence (e.g., 2, 3, 4, 5, 6, 7, 8, 9, 10 or more antisense sequences) can be used to inhibit the expression of a gene. For example, a construct can contain a nucleic acid having at least one strand that is a template for two sense sequences and two antisense sequences. The multiple sense sequences can be identical or different, and the multiple antisense sequences can be identical or different. For example, a construct can have a nucleic acid having one strand that is a template for two identical sense sequences and two identical antisense sequences that are complementary to the two identical sense sequences. Alternatively, an isolated nucleic acid can have one strand that is a template for (1) two identical sense sequences 20 nucleotides in length, (2) one antisense sequence that is complementary to the two identical sense sequences 20 nucleotides in length, (3) a sense sequence 30 nucleotides in length, and (4) three identical antisense sequences that are complementary to the sense sequence 30 nucleotides in length. The constructs provided herein can be designed to have a suitable arrangement of sense and antisense sequences. For example, two identical sense sequences can be followed by two identical antisense sequences or can be positioned between two identical antisense sequences.

[0162] A nucleic acid having at least one strand that is a template for one or more sense and/or antisense sequences can be operably linked to a regulatory region to drive transcription of an RNA molecule containing the sense and/or antisense sequence(s). In addition, such a nucleic acid can be operably linked to a transcription terminator sequence, such as the terminator of the nopaline synthase (nos) gene. In some cases, two regulatory regions can direct transcription of two transcripts: one from the top strand, and one from the bottom strand. See, for example, Yan et al., Plant Physiol., 141:1508-1518 (2006). The two regulatory regions can be the same or different. The two transcripts can form double-stranded RNA molecules that induce degradation of the target RNA. In some cases, a nucleic acid can be positioned within a T-DNA or plant-derived transfer DNA (P-DNA) such that the left and right T-DNA border sequences or the left and right border-like sequences of the P-DNA flank, or are on either side of, the nucleic acid. See, US 2006/0265788. The nucleic acid sequence between the two regulatory regions can be from about 15 to about 300 nucleotides in length. In some embodiments, the nucleic acid sequence between the two regulatory regions is from about 15 to about 200 nucleotides in length, from about 15 to about 100 nucleotides in length, from about 15 to about 50 nucleotides in length, from about 18 to about 50 nucleotides in length, from about 18 to about 40 nucleotides in length, from about 18 to about 30 nucleotides in length, or from about 18 to about 25 nucleotides in length.

[0163] In some nucleic-acid based methods for inhibition of gene expression in plants, a suitable nucleic acid can be a nucleic acid analog. Nucleic acid analogs can be modified at the base moiety, sugar moiety, or phosphate backbone to improve, for example, stability, hybridization, or solubility of the nucleic acid. Modifications at the base moiety include deoxyuridine for deoxythymidine, and 5-methyl-2′-deoxycytidine and 5-bromo-2′-deoxycytidine for deoxycytidine. Modifications of the sugar moiety include modification of the 2′ hydroxyl of the ribose sugar to form 2′-O-methyl or 2′-O-allyl sugars. The deoxyribose phosphate backbone can be modified to produce morpholino nucleic acids, in which each base moiety is linked to a six-membered morpholino ring, or peptide nucleic acids, in which the deoxyphosphate backbone is replaced by a pseudopeptide backbone and the four bases are retained. See, for example, Summerton and Weller, Antisense Nucleic Acid Drug Dev., 7:187-195 (1997); Hyrup et al., Bioorgan. Med. Chem., 4:5-23 (1996). In addition, the deoxyphosphate backbone can be replaced with, for example, a phosphorothioate or phosphorodithioate backbone, a phosphoroamidite, or an alkyl phosphotriester backbone.

[0164] C. Constructs/Vectors

[0165] Recombinant constructs provided herein can be used to transform plants or plant cells in order to modulate biomass levels. A recombinant nucleic acid construct can comprise a nucleic acid encoding a biomass-modulating polypeptide as described herein, operably linked to a regulatory region suitable for expressing the biomass-modulating polypeptide in the plant or cell. Thus, a nucleic acid can comprise a coding sequence that encodes a biomass-modulating polypeptides as set forth in SEQ ID NOs: 1, 2, 4, 6, 8, 10, 11, 12, 13, 14, 15, 16, 17, 18, 20, 22, 24, 25, 27, 29, 30, 32, 33, 34, 36, 37, 38, 39, 40, 41, 43, 45, 47, 49, 50, 51, 53, 54, 56, 58, 59, 61, 63, 64, 66, 68, 70, 71, 72, 74, 75, 77, 79, 81, 82, 84, 86, 87, 88, 90, 92, 94, 96, 98, 100, 102, 104, 106, 108, 110, 112, 114, 115, 117, 118, 120, 121, 122, 123, 125, 127, 129, 131, 132, 133, 135, 137, 139, 141, 142, 144, 145, 146, 147, 149, 151, 152, 153, 154, 155, 156, 158, 160, 162, 163, 164, 166, 168, 169, 171, 173, 174, 176, 178, 180, 182, 184, 185, 186, 188, 189, 190, 191, 193, 194, 195, 196, 198, 200, 202, 203, 204, 206, 207, 209, 210, 212, 214, 216, 218, 220, 222, 224, 226, 228, 230, 232, 234, 236, 238, 239, 241, 242, 243, 244, 245, 246, 247, 248, 249, 250, 251, 253, 255, 257, 259, 261, 263, 264, 266, 268, 269, 271, 273, 275, 276, 278, 279, 281, 282, 283, 285, 287, 289, 291, 292, 294, 295, 296, 297, 298, 299, 300, 302, 304, 305, 306, 308, 310, 311, 312, 314, 315, 317, 319, 320, 321, 323, 324, 326, 327, 329, 331, 332, 334, 336, 337, 338, 340, 342, 343, 345, 347, 349, 351, 353, 354, 356, 357, 359, 361, 363, 365, 367, 369, 371, 372, 374, 376, 378, 380, 382, 384, 386, 388, 390, 391, 393, 395, 397, 399, 401, 403, 405, 406, 407, 409, 411, 413, 415, 416, 417, 418, 420, 421, 422, 424, 426, 428, 429, 430, 431, 433, 435, 436, 437, 438, 439, 440, 442, 444, 446, 447, 448, 449, 450, 452, 453, 454, 455, 456, 457, 459, 461, 463, 464, 466, 467, 468, 470, 472, 474, 476, 478, 479, 480, 482, 483, 484, 486, 488, 490, 492, 493, 495, 497, 499, 500, 501, 502, 503, 504, 506, 508, 509, 511, 513, 515, 516, 517, 518, 519, 521, 523, 525, 526, 528, 529, 531, 532, 534, 536, 537, 539, 540, 541, 543, 545, 547, 549, 550, 551, 552, 554, 556, 558, 560, 562, 563, 565, 567, 569, 571, 573, 574, 575, 577, 579, 581, 583, 585, 587, 589, 591, 593, 595, 597, 598, 600, 602, 603, 604, 605, 606, 608, 609, 610, 611, 613, 615, 616, 618, 619, 620, 622, 623, 625, 627, 629, 630, 632, 633, 634, 636, 637, 638, 639, 641, 642, 643, 645, 647, 649, 651, 652, 653, 655, 657, 659, 660, 662, 664, 666, 667, 669, 670, 671, 672, 673, 674, 675, 676, 677, 689, 691, 693, 695, or 697. Examples of nucleic acids encoding biomass-modulating polypeptides are set forth in SEQ ID NO: 3, 5, 7, 9, 19, 21, 23, 26, 28, 31, 35, 42, 44, 46, 48, 52, 55, 57, 60, 62, 65, 67, 69, 73, 76, 78, 80, 83, 85, 89, 91, 93, 95, 97, 99, 101, 103, 105, 107, 109, 111, 113, 116, 119, 124, 126, 128, 130, 134, 136, 138, 140, 143, 148, 150, 157, 159, 161, 165, 167, 170, 172, 175, 177, 179, 181, 183, 187, 192, 197, 199, 201, 205, 208, 211, 213, 215, 217, 219, 221, 223, 225, 227, 229, 231, 233, 235, 237, 240, 252, 254, 256, 258, 260, 262, 265, 267, 270, 272, 274, 277, 280, 284, 286, 288, 290, 293, 301, 303, 307, 309, 313, 316, 318, 322, 325, 328, 330, 333, 335, 339, 341, 344, 346, 348, 350, 352, 355, 358, 360, 362, 364, 366, 368, 370, 373, 375, 377, 379, 381, 383, 385, 387, 389, 392, 394, 396, 398, 400, 402, 404, 408, 410, 412, 414, 419, 423, 425, 427, 432, 434, 441, 443, 445, 451, 458, 460, 462, 465, 469, 471, 473, 475, 477, 481, 485, 487, 489, 491, 494, 496, 498, 505, 507, 510, 512, 514, 520, 522, 524, 527, 530, 533, 535, 538, 542, 544, 546, 548, 553, 555, 557, 559, 561, 564, 566, 568, 570, 572, 576, 578, 580, 582, 584, 586, 588, 590, 592, 594, 596, 599, 601, 607, 612, 614, 617, 621, 624, 626, 628, 631, 635, 640, 644, 646, 648, 650, 654, 656, 658, 661, 663, 665, 668, 678, 679, 680, 681, 682, 683, 684, 685, 686, 687, 688, 690, 692, 694, or 696, or in the Sequence Listing. The biomass-modulating polypeptide encoded by a recombinant nucleic acid can be a native biomass-modulating polypeptide, or can be heterologous to the cell. In some cases, the recombinant construct contains a nucleic acid that inhibits expression of a biomass-modulating polypeptide, operably linked to a regulatory region. Examples of suitable regulatory regions are described in the section entitled “Regulatory Regions.”

[0166] Vectors containing recombinant nucleic acid constructs such as those described herein also are provided. Suitable vector backbones include, for example, those routinely used in the art such as plasmids, viruses, artificial chromosomes, BACs, YACs, or PACs. Suitable expression vectors include, without limitation, plasmids and viral vectors derived from, for example, bacteriophage, baculoviruses, and retroviruses. Numerous vectors and expression systems are commercially available from such corporations as Novagen® (Madison, Wis.), Clontech® (Palo Alto, Calif.), Stratagene® (La Jolla, Calif.), and Invitrogen/Life Technologies® (Carlsbad, Calif.).

[0167] The vectors provided herein also can include, for example, origins of replication, scaffold attachment regions (SARs), and/or markers. A marker gene can confer a selectable phenotype on a plant cell. For example, a marker can confer biocide resistance, such as resistance to an antibiotic (e.g., kanamycin, G418, bleomycin, or hygromycin), or an herbicide (e.g., glyphosate, chlorsulfuron or phosphinothricin). In addition, an expression vector can include a tag sequence designed to facilitate manipulation or detection (e.g., purification or localization) of the expressed polypeptide. Tag sequences, such as luciferase, β-glucuronidase (GUS), green fluorescent protein (GFP), glutathione S-transferase (GST), polyhistidine, c-myc, hemagglutinin, or Flag™ tag (Kodak, New Haven, Conn.) sequences typically are expressed as a fusion with the encoded polypeptide. Such tags can be inserted anywhere within the polypeptide, including at either the carboxyl or amino terminus.

[0168] D. Regulatory Regions

[0169] The choice of regulatory regions to be included in a recombinant construct depends upon several factors, including, but not limited to, efficiency, selectability, inducibility, desired expression level, and cell- or tissue-preferential expression. It is a routine matter for one of skill in the art to modulate the expression of a coding sequence by appropriately selecting and positioning regulatory regions relative to the coding sequence. Transcription of a nucleic acid can be modulated in a similar manner.

[0170] Some suitable regulatory regions initiate transcription only, or predominantly, in certain cell types. Methods for identifying and characterizing regulatory regions in plant genomic DNA are known, including, for example, those described in the following references: Jordano et al., Plant Cell, 1:855-866 (1989); Bustos et al., Plant Cell, 1:839-854 (1989); Green et al., EMBO J., 7:4035-4044 (1988); Meier et al., Plant Cell, 3:309-316 (1991); and Zhang et al., Plant Physiology, 110:1069-1079 (1996).

[0171] Examples of various classes of regulatory regions are described below. Some of the regulatory regions indicated below as well as additional regulatory regions are described in more detail in U.S. Patent Application Ser. Nos. 60/505,689; 60/518,075; 60/544,771; 60/558,869; 60/583,691; 60/619,181; 60/637,140; 60/757,544; 60/776,307; 10/957,569; 11/058,689; 11/172,703; 11/208,308; 11/274,890; 60/583,609; 60/612,891; 11/097,589; 11/233,726; 11/408,791; 11/414,142; 10/950,321; 11/360,017; PCT/US05/011105; PCT/US05/23639; PCT/US05/034308; PCT/US05/034343; and PCT/US06/038236; PCT/US06/040572; and PCT/US07/62762.

[0172] For example, the sequences of regulatory regions p326, YP0144, YP0190, p13879, YP0050, p32449, 21876, YP0158, YP0214, YP0380, PT0848, PT0633, YP0128, YP0275, PT0660, PT0683, PT0758, PT0613, PT0672, PT0688, PT0837, YP0092, PT0676, PT0708, YP0396, YP0007, YP0111, YP0103, YP0028, YP0121, YP0008, YP0039, YP0115, YP0119, YP0120, YP0374, YP0101, YP0102, YP0110, YP0117, YP0137, YP0285, YP0212, YP0097, YP0107, YP0088, YP0143, YP0156, PT0650, PT0695, PT0723, PT0838, PT0879, PT0740, PT0535, PT0668, PT0886, PT0585, YP0381, YP0337, PT0710, YP0356, YP0385, YP0384, YP0286, YP0377, PD1367, PT0863, PT0829, PT0665, PT0678, YP0086, YP0188, YP0263, PT0743 and YP0096 are set forth in the sequence listing of PCT/US06/040572; the sequence of regulatory region PT0625 is set forth in the sequence listing of PCT/US05/034343; the sequences of regulatory regions PT0623, YP0388, YP0087, YP0093, YP0108, YP0022 and YP0080 are set forth in the sequence listing of U.S. patent application Ser. No. 11/172,703; the sequence of regulatory region PRO924 is set forth in the sequence listing of PCT/US07/62762; and the sequences of regulatory regions p530c10, pOsFIE2-2, pOsMEA, pOsYp102, and pOsYp285 are set forth in the sequence listing of PCT/US06/038236.

[0173] It will be appreciated that a regulatory region may meet criteria for one classification based on its activity in one plant species, and yet meet criteria for a different classification based on its activity in another plant species.

i. Broadly Expressing Promoters

[0174] A promoter can be said to be “broadly expressing” when it promotes transcription in many, but not necessarily all, plant tissues. For example, a broadly expressing promoter can promote transcription of an operably linked sequence in one or more of the shoot, shoot tip (apex), and leaves, but weakly or not at all in tissues such as roots or stems. As another example, a broadly expressing promoter can promote transcription of an operably linked sequence in one or more of the stem, shoot, shoot tip (apex), and leaves, but can promote transcription weakly or not at all in tissues such as reproductive tissues of flowers and developing seeds. Non-limiting examples of broadly expressing promoters that can be included in the nucleic acid constructs provided herein include the p326, YP0144, YP0190, p13879, YP0050, p32449, 21876, YP0158, YP0214, YP0380, PT0848, and PT0633 promoters. Additional examples include the cauliflower mosaic virus (CaMV) 35S promoter, the mannopine synthase (MAS) promoter, the 1′ or 2′ promoters derived from T-DNA of Agrobacterium tumefaciens, the figwort mosaic virus 34S promoter, actin promoters such as the rice actin promoter, and ubiquitin promoters such as the maize ubiquitin-1 promoter. In some cases, the CaMV 35S promoter is excluded from the category of broadly expressing promoters.

[0175] ii. Root Promoters

[0176] Root-active promoters confer transcription in root tissue, e.g., root endodermis, root epidermis, or root vascular tissues. In some embodiments, root-active promoters are root-preferential promoters, i.e., confer transcription only or predominantly in root tissue. Root-preferential promoters include the YP0128, YP0275, PT0625, PT0660, PT0683, and PT0758 promoters. Other root-preferential promoters include the PT0613, PT0672, PT0688, and PT0837 promoters, which drive transcription primarily in root tissue and to a lesser extent in ovules and/or seeds. Other examples of root-preferential promoters include the root-specific subdomains of the CaMV 35S promoter (Lam et al., Proc. Natl. Acad. Sci. USA, 86:7890-7894 (1989)), root cell specific promoters reported by Conkling et al., Plant Physiol., 93:1203-1211 (1990), and the tobacco RD2 promoter.

[0177] iii. Maturing Endosperm Promoters

[0178] In some embodiments, promoters that drive transcription in maturing endosperm can be useful. Transcription from a maturing endosperm promoter typically begins after fertilization and occurs primarily in endosperm tissue during seed development and is typically highest during the cellularization phase. Most suitable are promoters that are active predominantly in maturing endosperm, although promoters that are also active in other tissues can sometimes be used. Non-limiting examples of maturing endosperm promoters that can be included in the nucleic acid constructs provided herein include the napin promoter, the Arcelin-5 promoter, the phaseolin promoter (Bustos et al., Plant Cell, 1(9):839-853 (1989)), the soybean trypsin inhibitor promoter (Riggs et al., Plant Cell, 1(6):609-621 (1989)), the ACP promoter (Baerson et al., Plant Mol. Biol., 22(2):255-267 (1993)), the stearoyl-ACP desaturase promoter (Slocombe et al., Plant Physiol., 104(4):167-176 (1994)), the soybean a′ subunit of β-conglycinin promoter (Chen et al., Proc. Natl. Acad. Sci. USA, 83:8560-8564 (1986)), the oleosin promoter (Hong et al., Plant Mol. Biol., 34(3):549-555 (1997)), and zein promoters, such as the 15 kD zein promoter, the 16 kD zein promoter, 19 kD zein promoter, 22 kD zein promoter and 27 kD zein promoter. Also suitable are the Osgt-1 promoter from the rice glutelin-1 gene (Zheng et al., Mol. Cell. Biol., 13:5829-5842 (1993)), the beta-amylase promoter, and the barley hordein promoter. Other maturing endosperm promoters include the YP0092, PT0676, and PT0708 promoters.

[0179] iv. Ovary Tissue Promoters

[0180] Promoters that are active in ovary tissues such as the ovule wall and mesocarp can also be useful, e.g., a polygalacturonidase promoter, the banana TRX promoter, the melon actin promoter, YP0396, and PT0623. Examples of promoters that are active primarily in ovules include YP0007, YP0111, YP0092, YP0103, YP0028, YP0121, YP0008, YP0039, YP0115, YP0119, YP0120, and YP0374.

[0181] v. Embryo Sac/Early Endosperm Promoters

[0182] To achieve expression in embryo sac/early endosperm, regulatory regions can be used that are active in polar nuclei and/or the central cell, or in precursors to polar nuclei, but not in egg cells or precursors to egg cells. Most suitable are promoters that drive expression only or predominantly in polar nuclei or precursors thereto and/or the central cell. A pattern of transcription that extends from polar nuclei into early endosperm development can also be found with embryo sac/early endosperm-preferential promoters, although transcription typically decreases significantly in later endosperm development during and after the cellularization phase. Expression in the zygote or developing embryo typically is not present with embryo sac/early endosperm promoters.

[0183] Promoters that may be suitable include those derived from the following genes: Arabidopsis viviparous-1 (see, GenBank No. U93215); Arabidopsis atmycl (see, Urao, Plant Mol. Biol., 32:571-57 (1996); Conceicao, Plant, 5:493-505 (1994)); Arabidopsis FIE (GenBank No. AF129516); Arabidopsis MEA; Arabidopsis FIS2 (GenBank No. AF096096); and FIE 1.1 (U.S. Pat. No. 6,906,244). Other promoters that may be suitable include those derived from the following genes: maize MAC1 (see, Sheridan, Genetics, 142:1009-1020 (1996)); maize Cat3 (see, GenBank No. L05934; Abler, Plant Mol. Biol., 22:10131-1038 (1993)). Other promoters include the following Arabidopsis promoters: YP0039, YP0101, YP0102, YP0110, YP0117, YP0119, YP0137, DME, YP0285, and YP0212. Other promoters that may be useful include the following rice promoters: p530c10, pOsFIE2-2, pOsMEA, pOsYp102, and pOsYp285.

[0184] vi. Embryo Promoters

[0185] Regulatory regions that preferentially drive transcription in zygotic cells following fertilization can provide embryo-preferential expression. Most suitable are promoters that preferentially drive transcription in early stage embryos prior to the heart stage, but expression in late stage and maturing embryos is also suitable. Embryo-preferential promoters include the barley lipid transfer protein (Ltp1) promoter (Plant Cell Rep 20:647-654 (2001)), YP0097, YP0107, YP0088, YP0143, YP0156, PT0650, PT0695, PT0723, PT0838, PT0879, and PT0740.

[0186] vii. Photosynthetic Tissue Promoters

[0187] Promoters active in photosynthetic tissue confer transcription in green tissues such as leaves and stems. Most suitable are promoters that drive expression only or predominantly in such tissues. Examples of such promoters include the ribulose-1,5-bisphosphate carboxylase (RbcS) promoters such as the RbcS promoter from eastern larch (Larix laricina), the pine cab6 promoter (Yamamoto et al., Plant Cell Physiol., 35:773-778 (1994)), the Cab-1 promoter from wheat (Fejes et al., Plant Mol. Biol., 15:921-932 (1990)), the CAB-1 promoter from spinach (Lubberstedt et al., Plant Physiol., 104:997-1006 (1994)), the cab1R promoter from rice (Luan et al., Plant Cell, 4:971-981 (1992)), the pyruvate orthophosphate dikinase (PPDK) promoter from corn (Matsuoka et al., Proc. Natl. Acad. Sci. USA, 90:9586-9590 (1993)), the tobacco Lhcbl*2 promoter (Cerdan et al., Plant Mol. Biol., 33:245-255 (1997)), the Arabidopsis thaliana SUC2 sucrose-H+ symporter promoter (Truernit et al., Planta, 196:564-570 (1995)), and thylakoid membrane protein promoters from spinach (psaD, psaF, psaE, PC, FNR, atpC, atpD, cab, rbcS). Other photosynthetic tissue promoters include PT0535, PT0668, PT0886, YP0144, YP0380 and PT0585.

[0188] viii. Vascular Tissue Promoters

[0189] Examples of promoters that have high or preferential activity in vascular bundles include YP0087, YP0093, YP0108, YP0022, and YP0080. Other vascular tissue-preferential promoters include the glycine-rich cell wall protein GRP 1.8 promoter (Keller and Baumgartner, Plant Cell, 3(10):1051-1061 (1991)), the Commelina yellow mottle virus (CoYMV) promoter (Medberry et al., Plant Cell, 4(2):185-192 (1992)), and the rice tungro bacilliform virus (RTBV) promoter (Dai et al., Proc. Natl. Acad. Sci. USA, 101(2):687-692 (2004)).

[0190] ix. Inducible Promoters

[0191] Inducible promoters confer transcription in response to external stimuli such as chemical agents or environmental stimuli. For example, inducible promoters can confer transcription in response to hormones such as giberellic acid or ethylene, or in response to light or drought. Examples of drought-inducible promoters include YP0380, PT0848, YP0381, YP0337, PT0633, YP0374, PT0710, YP0356, YP0385, YP0396, YP0388, YP0384, PT0688, YP0286, YP0377, PD1367, and PD0901. Examples of nitrogen-inducible promoters include PT0863, PT0829, PT0665, and PT0886. Examples of shade-inducible promoters include PRO924 and PT0678. An example of a promoter induced by salt is rd29A (Kasuga et al. (1999) Nature Biotech 17: 287-291).

[0192] x. Basal Promoters

[0193] A basal promoter is the minimal sequence necessary for assembly of a transcription complex required for transcription initiation. Basal promoters frequently include a “TATA box” element that may be located between about 15 and about 35 nucleotides upstream from the site of transcription initiation. Basal promoters also may include a “CCAAT box” element (typically the sequence CCAAT) and/or a GGGCG sequence, which can be located between about 40 and about 200 nucleotides, typically about 60 to about 120 nucleotides, upstream from the transcription start site.

[0194] xi. Stem Promoters

[0195] A stem promoter may be specific to one or more stem tissues or specific to stem and other plant parts. Stem promoters may have high or preferential activity in, for example, epidermis and cortex, vascular cambium, procambium, or xylem. Examples of stem promoters include YP0018 which is disclosed in US20060015970 and CryIA(b) and CryIA(c) (Braga et al. 2003, Journal of New Seeds 5:209-221).

[0196] xii. Other Promoters

[0197] Other classes of promoters include, but are not limited to, shoot-preferential, callus-preferential, trichome cell-preferential, guard cell-preferential such as PT0678, tuber-preferential, parenchyma cell-preferential, and senescence-preferential promoters. Promoters designated YP0086, YP0188, YP0263, PT0758, PT0743, PT0829, YP0119, and YP0096, as described in the above-referenced patent applications, may also be useful.

[0198] xiii. Other Regulatory Regions

[0199] A 5′ untranslated region (UTR) can be included in nucleic acid constructs described herein. A 5′ UTR is transcribed, but is not translated, and lies between the start site of the transcript and the translation initiation codon and may include the +1 nucleotide. A 3′ UTR can be positioned between the translation termination codon and the end of the transcript. UTRs can have particular functions such as increasing mRNA stability or attenuating translation. Examples of 3′ UTRs include, but are not limited to, polyadenylation signals and transcription termination sequences, e.g., a nopaline synthase termination sequence.

[0200] It will be understood that more than one regulatory region may be present in a recombinant polynucleotide, e.g., introns, enhancers, upstream activation regions, transcription terminators, and inducible elements. Thus, for example, more than one regulatory region can be operably linked to the sequence of a polynucleotide encoding a biomass-modulating polypeptide.

[0201] Regulatory regions, such as promoters for endogenous genes, can be obtained by chemical synthesis or by subcloning from a genomic DNA that includes such a regulatory region. A nucleic acid comprising such a regulatory region can also include flanking sequences that contain restriction enzyme sites that facilitate subsequent manipulation.

### IV. TRANSGENIC PLANTS AND PLANT CELLS

[0202] A. Transformation

[0203] The invention also features transgenic plant cells and plants comprising at least one recombinant nucleic acid construct described herein. A plant or plant cell can be transformed by having a construct integrated into its genome, i.e., can be stably transformed. Stably transformed cells typically retain the introduced nucleic acid with each cell division. A plant or plant cell can also be transiently transformed such that the construct is not integrated into its genome. Transiently transformed cells typically lose all or some portion of the introduced nucleic acid construct with each cell division such that the introduced nucleic acid cannot be detected in daughter cells after a sufficient number of cell divisions. Both transiently transformed and stably transformed transgenic plants and plant cells can be useful in the methods described herein.

[0204] Transgenic plant cells used in methods described herein can constitute part or all of a whole plant. Such plants can be grown in a manner suitable for the species under consideration, either in a growth chamber, a greenhouse, or in a field. Transgenic plants can be bred as desired for a particular purpose, e.g., to introduce a recombinant nucleic acid into other lines, to transfer a recombinant nucleic acid to other species, or for further selection of other desirable traits. Alternatively, transgenic plants can be propagated vegetatively for those species amenable to such techniques. As used herein, a transgenic plant also refers to progeny of an initial transgenic plant provided the progeny inherits the transgene. Seeds produced by a transgenic plant can be grown and then selfed (or outcrossed and selfed) to obtain seeds homozygous for the nucleic acid construct.

[0205] Transgenic plants can be grown in suspension culture, or tissue or organ culture. For the purposes of this invention, solid and/or liquid tissue culture techniques can be used. When using solid medium, transgenic plant cells can be placed directly onto the medium or can be placed onto a filter that is then placed in contact with the medium. When using liquid medium, transgenic plant cells can be placed onto a flotation device, e.g., a porous membrane that contacts the liquid medium. A solid medium can be, for example, Murashige and Skoog (MS) medium containing agar and a suitable concentration of an auxin, e.g., 2,4-dichlorophenoxyacetic acid (2,4-D), and a suitable concentration of a cytokinin, e.g., kinetin.

[0206] When transiently transformed plant cells are used, a reporter sequence encoding a reporter polypeptide having a reporter activity can be included in the transformation procedure and an assay for reporter activity or expression can be performed at a suitable time after transformation. A suitable time for conducting the assay typically is about 1-21 days after transformation, e.g., about 1-14 days, about 1-7 days, or about 1-3 days. The use of transient assays is particularly convenient for rapid analysis in different species, or to confirm expression of a heterologous biomass-modulating polypeptide whose expression has not previously been confirmed in particular recipient cells.

[0207] Techniques for introducing nucleic acids into monocotyledonous and dicotyledonous plants are known in the art, and include, without limitation, Agrobacterium-mediated transformation, viral vector-mediated transformation, electroporation and particle gun transformation, e.g., U.S. Pat. Nos. 5,538,880; 5,204,253; 6,329,571 and 6,013,863. If a cell or cultured tissue is used as the recipient tissue for transformation, plants can be regenerated from transformed cultures if desired, by techniques known to those skilled in the art.

[0208] B. Screening/selection

[0209] A population of transgenic plants can be screened and/or selected for those members of the population that have a trait or phenotype conferred by expression of the transgene. For example, a population of progeny of a single transformation event can be screened for those plants having a desired level of expression of a biomass-modulating polypeptide or nucleic acid. Physical and biochemical methods can be used to identify expression levels. These include Southern analysis or PCR amplification for detection of a polynucleotide; Northern blots, 51 RNase protection, primer-extension, or RT-PCR amplification for detecting RNA transcripts; enzymatic assays for detecting enzyme or ribozyme activity of polypeptides and polynucleotides; and protein gel electrophoresis, Western blots, immunoprecipitation, and enzyme-linked immunoassays to detect polypeptides. Other techniques such as in situ hybridization, enzyme staining, and immunostaining also can be used to detect the presence or expression of polypeptides and/or polynucleotides. Methods for performing all of the referenced techniques are known. As an alternative, a population of plants comprising independent transformation events can be screened for those plants having a desired trait, such as a modulated level of biomass. Selection and/or screening can be carried out over one or more generations, and/or in more than one geographic location. In some cases, transgenic plants can be grown and selected under conditions which induce a desired phenotype or are otherwise necessary to produce a desired phenotype in a transgenic plant. In addition, selection and/or screening can be applied during a particular developmental stage in which the phenotype is expected to be exhibited by the plant. Selection and/or screening can be carried out to choose those transgenic plants having a statistically significant difference in a biomass level relative to a control plant that lacks the transgene. Selected or screened transgenic plants have an altered phenotype as compared to a corresponding control plant, as described in the “Transgenic Plant Phenotypes” section herein.

[0210] C. Plant Species

[0211] The polynucleotides and vectors described herein can be used to transform a number of monocotyledonous and dicotyledonous plants and plant cell systems, including species from one of the following families: Acanthaceae, Alliaceae, Alstroemeriaceae, Amaryllidaceae, Apocynaceae, Arecaceae, Asteraceae, Berberidaceae, Bixaceae, Brassicaceae, Bromeliaceae, Cannabaceae, Caryophyllaceae, Cephalotaxaceae, Chenopodiaceae, Colchicaceae, Cucurbitaceae, Dioscoreaceae, Ephedraceae, Erythroxylaceae, Euphorbiaceae, Fabaceae, Lamiaceae, Linaceae, Lycopodiaceae, Malvaceae, Melanthiaceae, Musaceae, Myrtaceae, Nyssaceae, Papaveraceae, Pinaceae, Plantaginaceae, Poaceae, Rosaceae, Rubiaceae, Salicaceae, Sapindaceae, Solanaceae, Taxaceae, Theaceae, or Vitaceae.

[0212] Suitable species may include members of the genus Abelmoschus, Abies, Acer, Agrostis, Allium, Alstroemeria, Ananas, Andrographis, Andropogon, Artemisia, Arundo, Atropa, Berberis, Beta, Bixa, Brassica, Calendula, Camellia, Camptotheca, Cannabis, Capsicum, Carthamus, Catharanthus, Cephalotaxus, Chrysanthemum, Cinchona, Citrullus, Coffea, Colchicum, Coleus, Cucumis, Cucurbita, Cynodon, Datura, Dianthus, Digitalis, Dioscorea, Elaeis, Ephedra, Erianthus, Erythroxylum, Eucalyptus, Festuca, Fragaria, Galanthus, Glycine, Gossypium, Helianthus, Hevea, Hordeum, Hyoscyamus, Jatropha, Lactuca, Linum, Lolium, Lupinus, Lycopersicon, Lycopodium, Manihot, Medicago, Mentha, Miscanthus, Musa, Nicotiana, Oryza, Panicum, Papaver, Parthenium, Pennisetum, Petunia, Phalaris, Phleum, Pinus, Poa, Poinsettia, Populus, Rauwolfia, Ricinus, Rosa, Saccharum, Salix, Sanguinaria, Scopolia, Secale, Solanum, Sorghum, Spartina, Spinacea, Tanacetum, Taxus, Theobroma, Triticosecale, Triticum, Uniola, Veratrum, Vinca, Vitis, and Zea.

[0213] Suitable species include Panicum spp., Sorghum spp., Miscanthus spp., Saccharum spp., Erianthus spp., Populus spp., Andropogon gerardii (big bluestem), Pennisetum purpureum (elephant grass), Phalaris arundinacea (reed canarygrass), Cynodon dactylon (bermudagrass), Festuca arundinacea (tall fescue), Spartina pectinata (prairie cord-grass), Medicago sativa (alfalfa), Arundo donax (giant reed), Secale cereale (rye), Salix spp. (willow), Eucalyptus spp. (eucalyptus), Triticosecale (triticum—wheat X rye) and bamboo.

[0214] Suitable species also include Helianthus annuus (sunflower), Carthamus tinctorius (safflower), Jatropha curcas (jatropha), Ricinus communis (castor), Elaeis guineensis (palm), Linum usitatissimum (flax), and Brassica juncea.

[0215] Suitable species also include Beta vulgaris (sugarbeet), and Manihot esculenta (cassaya)

[0216] Suitable species also include Lycopersicon esculentum (tomato), Lactuca sativa (lettuce), Musa paradisiaca (banana), Solanum tuberosum (potato), Brassica oleracea (broccoli, cauliflower, Brussels sprouts), Camellia sinensis (tea), Fragaria ananassa (strawberry), Theobroma cacao (cocoa), Coffea arabica (coffee), Vitis vinifera (grape), Ananas comosus (pineapple), Capsicum annum (hot & sweet pepper), Allium cepa (onion), Cucumis melo (melon), Cucumis sativus (cucumber), Cucurbita maxima (squash), Cucurbita moschata (squash), Spinacea oleracea (spinach), Citrullus lanatus (watermelon), Abelmoschus esculentus (okra), and Solanum melongena (eggplant).

[0217] Suitable species also include Papaver somniferum (opium poppy), Papaver orientale, Taxus baccata, Taxus brevifolia, Artemisia annua, Cannabis sativa, Camptotheca acuminate, Catharanthus roseus, Vinca rosea, Cinchona officinalis, Colchicum autumnale, Veratrum californica, Digitalis lanata, Digitalis purpurea, Dioscorea spp., Andrographis paniculata, Atropa belladonna, Datura stomonium, Berberis spp., Cephalotaxus spp., Ephedra sinica, Ephedra spp., Erythroxylum coca, Galanthus wornorii, Scopolia spp., Lycopodium serratum (Huperzia serrata), Lycopodium spp., Rauwolfia serpentina, Rauwolfia spp., Sanguinaria canadensis, Hyoscyamus spp., Calendula officinalis, Chrysanthemum parthenium, Coleus forskohlii, and Tanacetum parthenium.

[0218] Suitable species also include Parthenium argentatum (guayule), Hevea spp. (rubber), Mentha spicata (mint), Mentha piperita (mint), Bixa orellana, and Alstroemeria spp.

[0219] Suitable species also include Rosa spp. (rose), Dianthus caryophyllus (carnation), Petunia spp. (petunia) and Poinsettia pulcherrima (poinsettia).

[0220] Suitable species also include Nicotiana tabacum (tobacco), Lupinus albus (lupin), Uniola paniculata (oats), bentgrass (Agrostis spp.), Populus tremuloides (aspen), Pinus spp. (pine), Abies spp. (fir), Acer spp. (maple), Hordeum vulgare (barley), Poa pratensis (bluegrass), Lolium spp. (ryegrass) and Phleum pratense (timothy).

[0221] In some embodiments, a suitable species can be a wild, weedy, or cultivated Pennisetum species such as, but not limited to, Pennisetum alopecuroides, Pennisetum arnhemicum, Pennisetum caffrum, Pennisetum clandestinum, Pennisetum divisum, Pennisetum glaucum, Pennisetum latifolium, Pennisetum macrostachyum, Pennisetum macrourum, Pennisetum orientate, Pennisetum pedicellatum, Pennisetum polystachion, Pennisetum polystachion ssp. Setosum, Pennisetum purpureum, Pennisetum setaceum, Pennisetum subangustum, Pennisetum typhoides, Pennisetum villosum, or hybrids thereof (e.g., Pennisetum purpureum×Pennisetum typhoidum).

[0222] In some embodiments, a suitable species can be a wild, weedy, or cultivated Miscanthus species and/or variety such as, but not limited to, Miscanthus×giganteus, Miscanthus sinensis, Miscanthus×ogiformis, Miscanthus floridulus, Miscanthus transmorrisonensis, Miscanthus oligostachyus, Miscanthus nepalensis, Miscanthus sacchariflorus, Miscanthus×giganteus ‘Amuri’, Miscanthus×giganteus ‘Nagara’, Miscanthus×giganteus ‘Illinois’, Miscanthus sinensis var. ‘Goliath’, Miscanthus sinensis var. ‘Roland’, Miscanthus sinensis var. ‘Africa’, Miscanthus sinensis var. ‘Fern Osten’, Miscanthus sinensis var. gracillimus, Miscanthus sinensis var. variegates, Miscanthus sinensis var. purpurascens, Miscanthus sinensis var. ‘Malepartus’, Miscanthus sacchariflorus var. ‘Robusta’, Miscanthus sinensis var. ‘Silberfedher’ (aka. Silver Feather), Miscanthus transmorrisonensis, Miscanthus condensatus, Miscanthus yakushimanum, Miscanthus var. ‘Alexander’, Miscanthus var. ‘Adagio’, Miscanthus var. ‘Autumn Light’, Miscanthus var. ‘Cabaret’, Miscanthus var. ‘Condensatus’, Miscanthus var. ‘Cosmopolitan’, Miscanthus var. ‘Dixieland’, Miscanthus var. ‘Gilded Tower’ (U.S. Pat. No. PP14,743), Miscanthus var. ‘Gold Bar’ (U.S. Pat. No. PP15,193), Miscanthus var. ‘Gracillimus’, Miscanthus var. ‘Graziella’, Miscanthus var. ‘Grosse Fontaine’, Miscanthus var. ‘Hinjo aka Little Nicky'™, Miscanthus var. ‘Juli’, Miscanthus var. ‘Kaskade’, Miscanthus var. ‘Kirk Alexander’, Miscanthus var. ‘Kleine Fontaine’, Miscanthus var. ‘Kleine Silberspinne’ (aka. ‘Little Silver Spider’), Miscanthus var. ‘Little Kitten’, Miscanthus var. ‘Little Zebra’ (U.S. Pat. No. PP13,008), Miscanthus var. ‘Lottum’, Miscanthus var. ‘Malepartus’, Miscanthus var. ‘Morning Light’, Miscanthus var. ‘Mysterious Maiden’ (U.S. Pat. No. PP16,176), Miscanthus var. ‘Nippon’, Miscanthus var. ‘November Sunset’, Miscanthus var. ‘Parachute’, Miscanthus var. ‘Positano’, Miscanthus var. ‘Puenktchen’(aka ‘Little Dot’), Miscanthus var. ‘Rigoletto’, Miscanthus var. ‘Sarabande’, Miscanthus var. ‘Silberpfeil’ (aka.Silver Arrow), Miscanthus var. ‘Silverstripe’, Miscanthus var. ‘Super Stripe’ (U.S. Pat. No. PP 18,161), Miscanthus var. ‘Strictus’, or Miscanthus var. ‘Zebrinus’.

[0223] In some embodiments, a suitable species can be a wild, weedy, or cultivated sorghum species and/or variety such as, but not limited to, Sorghum almum, Sorghum amplum, Sorghum angustum, Sorghum arundinaceum, Sorghum bicolor (such as bicolor, guinea, caudatum, kafir, and durra), Sorghum brachypodum, Sorghum bulbosum, Sorghum burmahicum, Sorghum controversum, Sorghum drummondii, Sorghum ecarinatum, Sorghum exstans, Sorghum grande, Sorghum halepense, Sorghum interjectum, Sorghum intrans, Sorghum laxiflorum, Sorghum leiocladum, Sorghum macrospermum, Sorghum matarankense, Sorghum miliaceum, Sorghum nigrum, Sorghum nitidum, Sorghum plumosum, Sorghum propinquum, Sorghum purpureosericeum, Sorghum stipoideum, Sorghum sudanensese, Sorghum timorense, Sorghum trichocladum, Sorghum versicolor, Sorghum virgatum, Sorghum vulgare, or hybrids such as Sorghum×almum, Sorghum×sudangrass or Sorghum×drummondii.

[0224] Thus, the methods and compositions can be used over a broad range of plant species, including species from the dicot genera Brassica, Carthamus, Glycine, Gossypium, Helianthus, Jatropha, Parthenium, Populus, and Ricinus; and the monocot genera Elaeis, Festuca, Hordeum, Lolium, Oryza, Panicum, Pennisetum, Phleum, Poa, Saccharum, Secale, Sorghum, Triticosecale, Triticum, and Zea. In some embodiments, a plant is a member of the species Panicum virgatum(switchgrass), Sorghum bicolor (sorghum, sudangrass), Miscanthus giganteus (miscanthus), Saccharum sp. (energycane), Populus balsamifera (poplar), Zea mays (corn), Glycine max (soybean), Brassica napus (canola), Triticum aestivum (wheat), Gossypium hirsutum (cotton), Oryza sativa (rice), Helianthus annuus (sunflower), Medicago sativa (alfalfa), Beta vulgaris (sugarbeet), or Pennisetum glaucum (pearl millet).

[0225] In certain embodiments, the polynucleotides and vectors described herein can be used to transform a number of monocotyledonous and dicotyledonous plants and plant cell systems, wherein such plants are hybrids of different species or varieties of a specific species (e.g., Saccharum sp. X Miscanthus sp., Sorghum sp. X Miscanthus sp., e.g., Panicum virgatum×Panicum amarum, Panicum virgatum×Panicum amarulum, and Pennisetum purpureum×Pennisetum typhoidum).

[0226] D. Transgenic Plant Phenotypes

[0227] In some embodiments, a plant in which expression of a biomass-modulating polypeptide is modulated can have increased levels of biomass in plants. For example, a biomass-modulating polypeptide described herein can be expressed in a transgenic plant, resulting in increased levels of vegetative tissue. The biomass level can be increased by at least 2 percent, e.g., 2, 3, 4, 5, 6, 7, 8, 9, 10, 11, 12, 13, 14, 15, 16, 17, 18, 19, 20, 25, 30, 35, 40, 45, 50, 55, 60, or more than 60 percent, as compared to the biomass level in a corresponding control plant that does not express the transgene. In some embodiments, a plant in which expression of a biomass-modulating polypeptide is modulated can have decreased levels of seed production. The level can be decreased by at least 2 percent, e.g., 2, 3, 4, 5, 10, 15, 20, 25, 30, 35, or more than 35 percent, as compared to the seed production level in a corresponding control plant that does not express the transgene.

[0228] Increases in seed production in such plants can provide improved nutritional availability in geographic locales where intake of plant foods is often insufficient, or for biofuel production. In some embodiments, decreases in biomass in such plants can be useful in situations where vegetative tissues are not the primary plant part that is harvested for human or animal consumption (i.e., seeds are harvested).

[0229] In some embodiments, a plant in which expression of a biomass-modulating polypeptide is modulated can have increased or decreased levels of biomass in one or more plant tissues, e.g., vegetative tissues, reproductive tissues, or root tissues. For example, the biomass level can be increased by at least 2 percent, e.g., 2, 3, 4, 5, 6, 7, 8, 9, 10, 11, 12, 13, 14, 15, 16, 17, 18, 19, 20, 25, 30, 35, 40, 45, 50, 55, 60, or more than 60 percent, as compared to the biomass level in a corresponding control plant that does not express the transgene. In some embodiments, a plant in which expression of a biomass-modulating polypeptide is modulated can have decreased levels of biomass in one or more plant tissues. The biomass level can be decreased by at least 2 percent, e.g., 2, 3, 4, 5, 10, 15, 20, 25, 30, 35, or more than 35 percent, as compared to the biomass level in a corresponding control plant that does not express the transgene.

[0230] Increases in biomass in such plants can provide improved food quantity, or improved energy production. Decreases in biomass can provide more efficient partitioning of nutrients to plant part(s) that are harvested for human or animal consumption.

[0231] Typically, a difference in the amount of biomass in a transgenic plant or cell relative to a control plant or cell is considered statistically significant at p≦0.05 with an appropriate parametric or non-parametric statistic, e.g., Chi-square test, Student's t-test, Mann-Whitney test, or F-test. In some embodiments, a difference in the amount of biomass is statistically significant at p<0.01, p<0.005, or p<0.001. A statistically significant difference in, for example, the amount of biomass in a transgenic plant compared to the amount of a control plant indicates that the recombinant nucleic acid present in the transgenic plant results in altered biomass levels.

[0232] The phenotype of a transgenic plant is evaluated relative to a control plant. A plant is said “not to express” a polypeptide when the plant exhibits less than 10%, e.g., less than 9%, 8%, 7%, 6%, 5%, 4%, 3%, 2%, 1%, 0.5%, 0.1%, 0.01%, or 0.001%, of the amount of polypeptide or mRNA encoding the polypeptide exhibited by the plant of interest. Expression can be evaluated using methods including, for example, RT-PCR, Northern blots, 51 RNase protection, primer extensions, Western blots, protein gel electrophoresis, immunoprecipitation, enzyme-linked immunoassays, chip assays, and mass spectrometry. It should be noted that if a polypeptide is expressed under the control of a tissue-preferential or broadly expressing promoter, expression can be evaluated in the entire plant or in a selected tissue. Similarly, if a polypeptide is expressed at a particular time, e.g., at a particular time in development or upon induction, expression can be evaluated selectively at a desired time period.

[0233] Biomass can include harvestable plant tissues such as leaves, stems, and reproductive structures, or all plant tissues such as leaves, stems, roots, and reproductive structures. In some embodiments, biomass encompasses only above ground plant parts. In some embodiments, biomass encompasses only stem plant parts. In some embodiments, biomass encompasses only above ground plant parts except inflorescence and seed parts of a plant. Biomass can be measured as described in the examples section. Biomass can be quantified as dry matter yield, which is the mass of biomass produced (usually reported in T/acre) if the contribution of water is subtracted from the fresh mater weight. Dry matter yield (DMY) yield is calculated using the fresh matter weight (FMW) and a measurement of weight percent moisture (M) in the following equation. DMY=((100−M)/100)*FMW. Biomass can be quantified as fresh matter yield, which is the mass of biomass produced (usually reported in T/acre) on an as-received basis, which includes the weight of moisture.

### V. MODIFYING ENDOGENOUS NUCLEIC ACIDS ENCODING BIOMASS-MODULATING Polypeptides

[0234] This document also features plant cells and plants in which an endogenous biomass-modulating nucleic acid described herein has been modified (e.g., a regulatory region, intron, or coding region of the biomass-modulating nucleic acid has been modified). The biomass of such plants is altered relative to the corresponding level of a control plant in which the endogenous nucleic acid is not modified. Such plants are referred to herein as modified plants and may be used to produce, for example, increased amounts of biomass.

[0235] Endogenous nucleic acid can be modified by homologous recombination techniques. For example, sequence specific endonucleases (e.g., zinc finger nucleases (ZFNs)) and meganucleases can be used to stimulate homologous recombination at endogenous plant genes. See, e.g., Townsend et al., Nature 459:442-445 (2009); Tovkach et al., Plant J., 57:747-757 (2009); and Lloyd et al., Proc. Natl. Acad. Sci. USA, 102:2232-2237 (2005). In particular, ZFNs engineered to create DNA double strand breaks at specific loci can be used to make targeted sequence changes in endogenous plant genes. For example, an endogenous plant gene can be replaced with a variant containing one or more mutations (e.g., produced using site-directed mutagenesis or directed evolution).

[0236] In some embodiments, endogenous nucleic acids can be modified by methylation or demethylation such that the expression of the modified endogenous nucleic acid is altered. For example, a double stranded RNA can be used to activate gene expression by targeting noncoding regulatory regions in gene promoters. See Shibuya et al., Proc Natl Acad Sci USA, 106(5): 1660-1665 (2009); and Li et al., Proc Natl Acad Sci USA, 103(46):17337-42 (2006).

[0237] In some embodiments, endogenous nucleic acids can be modified using activation tagging. For example, a vector containing multiple copies of an enhancer element from the constitutively active promoter of the cauliflower mosaic virus (CaMV) 35S gene can be used to activate an endogenous gene. See, Weigel et al., Plant Physiology, 122:1003-1013 (2000).

[0238] In some embodiments, endogenous nucleic acids can be modified by introducing an engineered transcription activation/repression factor (e.g., zinc finger protein transcription factor, or ZFP TF. See, for example, the world wide web at sangamo.com/tech/tech_plat_over.html#whatarezfp). An engineered transcription activation/repression factor (such as ZFP TF) can activate, repress, or switch the target endogenous biomass gene expression by binding specifically to the promoter region or coding region of the endogenous gene.

[0239] In some embodiments, endogenous nucleic acids can be modified by mutagenesis. Genetic mutations can be introduced within regenerable plant tissue using one or more mutagenic agents. Suitable mutagenic agents include, for example, ethyl methane sulfonate (EMS), N-nitroso-N-ethylurea (ENU), methyl N-nitrosoguanidine (MNNG), ethidium bromide, diepoxybutane, ionizing radiation, x-rays, UV rays and other mutagens known in the art. Suitable types of mutations include, for example, insertions or deletions of nucleotides, and transitions or transversions in the endogenous nucleic acid sequence. In one embodiment, TILLING (Targeted Induced Local Lesions In Genomes) can be used to produce plants having a modified endogenous nucleic acid. TILLING combines high-density mutagenesis with high-throughput screening methods. See, for example, McCallum et al., Nat Biotechnol 18: 455-457 (2000); reviewed by Stemple, Nat Rev Genet. 5(2):145-50 (2004).

[0240] In some embodiments, an endogenous nucleic acid can be modified via a gene silencing technique. See, for example, the section herein regarding “Inhibition of Expression of a Biomass-Modulating Polypeptide.”

[0241] A population of plants can be screened and/or selected for those members of the population that have a modified nucleic acid. A population of plants also can be screened and/or selected for those members of the population that have a trait or phenotype conferred by expression of the modified nucleic acid. As an alternative, a population of plants can be screened for those plants having a desired trait, such as a modulated level of biomass. For example, a population of progeny can be screened for those plants having a desired level of expression of a biomass-modulating polypeptide or nucleic acid. Physical and biochemical methods can be used to identify modified nucleic acids and/or expression levels as described with transgenic plants. Selection and/or screening can be carried out over one or more generations, and/or in more than one geographic location. In some cases, plants can be grown and selected under conditions which induce a desired phenotype or are otherwise necessary to produce a desired phenotype in a modified plant. In addition, selection and/or screening can be applied during a particular developmental stage in which the phenotype is expected to be exhibited by the plant. Selection and/or screening can be carried out to choose those modified plants having a statistically significant difference in a biomass level relative to a control plant in which the nucleic acid has not been modified. Selected or screened modified plants have an altered phenotype as compared to a corresponding control plant, as described in the “Transgenic Plant Phenotypes” section herein.

[0242] Although a plant or plant cell in which an endogenous biomass-modulating nucleic acid has been modified is not transgenic for that particular nucleic acid, it will be appreciated that such a plant or cell may contain transgenes. For example, a modified plant can contain a transgene for other traits, such as herbicide tolerance or insect resistance. As another example, a modified plant can contain one or more transgenes that, in conjuction with modifications of one or more endogenous nucleic acids, exhibits an increase in biomass.

[0243] As with transgenic plant cells, modified plant cells can constitute part or all of a whole plant. Such plants can be grown in the same manner as described for transgenic plants and can be bred or propagated in the same manner as described for transgenic plants.

### VI. PLANT BREEDING

[0244] Genetic polymorphisms that are useful in such methods include simple sequence repeats (SSRs, or microsatellites), rapid amplification of polymorphic DNA (RAPDs), single nucleotide polymorphisms (SNPs), amplified fragment length polymorphisms (AFLPs) and restriction fragment length polymorphisms (RFLPs). SSR polymorphisms can be identified, for example, by making sequence specific probes and amplifying template DNA from individuals in the population of interest by PCR. For example, PCR techniques can be used to enzymatically amplify a genetic marker associated with a nucleotide sequence conferring a specific trait (e.g., nucleotide sequences described herein). PCR can be used to amplify specific sequences from DNA as well as RNA, including sequences from total genomic DNA or total cellular RNA. When using RNA as a source of template, reverse transcriptase can be used to synthesize complementary DNA (cDNA) strands. Various PCR methods are described, for example, in PCR Primer: A Laboratory Manual, Dieffenbach and Dveksler, eds., Cold Spring Harbor Laboratory Press, 1995.

[0245] Generally, sequence information from polynucleotides flanking the region of interest or beyond is employed to design oligonucleotide primers that are identical or similar in sequence to opposite strands of the template to be amplified. Primers are typically 14 to 40 nucleotides in length, but can range from 10 nucleotides to hundreds of nucleotides in length. Template and amplified DNA is repeatedly denatured at a high temperature to separate the double strand, then cooled to allow annealing of primers and the extension of nucleotide sequences through the microsatellite, resulting in sufficient DNA for detection of PCR products. If the probes flank an SSR in the population, PCR products of different sizes will be produced. See, e.g., U.S. Pat. No. 5,766,847.

[0246] PCR products can be qualitative or quantitatively analyzed using several techniques. For example, PCR products can be stained with a fluorescent molecule (e.g., PicoGreen® or OliGreen®) and detected in solution using spectrophotometry or capillary electrophoresis. In some cases, PCR products can be separated in a gel matrix (e.g., agarose or polyacrylamide) by electrophoresis, and size-fractionated bands comprising PCR products can be visualized using nucleic acid stains. Suitable stains can fluoresce under UV light (e.g., Ethidium bromide, GR Safe, SYBR® Green, or SYBR® Gold). The results can be visualized via transillumination or epi-illumination, and an image of the fluorescent pattern can be acquired using a camera or scanner, for example. The image can be processed and analyzed using specialized software (e.g., ImageJ) to measure and compare the intensity of a band of interest against a standard loaded on the same gel.

[0247] Alternatively, SSR polymorphisms can be identified by using PCR product(s) as a probe against Southern blots from different individuals in the population. See, U. H. Refseth et al., (1997) Electrophoresis 18: 1519. Briefly, PCR products are separated by length through gel electrophoresis and transferred to a membrane. SSR-specific DNA probes, such as oligonucleotides labeled with radioactive, fluorescent, or chromogenic molecules, are applied to the membrane and hybridize to bound PCR products with a complementary nucleotide sequence. The pattern of hybridization can be visualized by autoradiography or by development of color on the membrane, for example.

[0248] In some cases, PCR products can be quantified using a real-time thermocycler detection system. For example, Quantitative real-time PCR can use a fluorescent dye that forms a DNA-dye-complex (e.g., SYBR® Green), or a fluorophore-containing DNA probe, such as single-stranded oligonucleotides covalently bound to a fluorescent reporter or fluorophore (e.g. 6-carboxyfluorescein or tetrachlorofluorescin) and quencher (e.g., tetramethylrhodamine or dihydrocyclopyrroloindole tripeptide minor groove binder). The fluorescent signal allows detection of the amplified product in real time, thereby indicating the presence of a sequence of interest, and allowing quantification of the copy number of a sequence of interest in cellular DNA or expression level of a sequence of interest from cellular mRNA.

[0249] The identification of RFLPs is discussed, for example, in Alonso-Blanco et al. (Methods in Molecular Biology, vol. 82, “Arabidopsis Protocols”, pp. 137-146, J. M. Martinez-Zapater and J. Salinas, eds., c. 1998 by Humana Press, Totowa, N.J.); Burr (“Mapping Genes with Recombinant Inbreds”, pp. 249-254, in Freeling, M. and V. Walbot (Ed.), The Maize Handbook, c. 1994 by Springer-Verlag New York, Inc.: New York, N.Y., USA; Berlin Germany; Burr et al. Genetics (1998) 118: 519; and Gardiner, J. et al., (1993) Genetics 134: 917). For example, to produce a RFLP library enriched with single- or low-copy expressed sequences, total DNA can be digested with a methylation-sensitive enzyme (e.g., PstI). The digested DNA can be separated by size on a preparative gel. Polynucleotide fragments (500 to 2000 bp) can be excised, eluted and cloned into a plasmid vector (e.g., pUC18). Southern blots of plasmid digests can be probed with total sheared DNA to select clones that hybridize to single- and low-copy sequences. Additional restriction endonucleases can be tested to increase the number of polymorphisms detected.

[0250] The identification of AFLPs is discussed, for example, in EP 0 534 858 and U.S. Pat. No. 5,878,215. In general, total cellular DNA is digested with one or more restriction enzymes. Restriction halfsite-specific adapters are ligated to all restriction fragments and the fragments are selectively amplified with two PCR primers that have corresponding adaptor and restriction site specific sequences. The PCR products can be visualized after size-fractionation, as described above.

[0251] In some embodiments, the methods are directed to breeding a plant line. Such methods use genetic polymorphisms identified as described above in a marker assisted breeding program to facilitate the development of lines that have a desired alteration in the biomass trait. Once a suitable genetic polymorphism is identified as being associated with variation for the trait, one or more individual plants are identified that possess the polymorphic allele correlated with the desired variation. Those plants are then used in a breeding program to combine the polymorphic allele with a plurality of other alleles at other loci that are correlated with the desired variation. Techniques suitable for use in a plant breeding program are known in the art and include, without limitation, backcrossing, mass selection, pedigree breeding, bulk selection, crossing to another population and recurrent selection. These techniques can be used alone or in combination with one or more other techniques in a breeding program. Thus, each identified plants is selfed or crossed a different plant to produce seed which is then germinated to form progeny plants. At least one such progeny plant is then selfed or crossed with a different plant to form a subsequent progeny generation. The breeding program can repeat the steps of selfing or outcrossing for an additional 0 to 5 generations as appropriate in order to achieve the desired uniformity and stability in the resulting plant line, which retains the polymorphic allele. In most breeding programs, analysis for the particular polymorphic allele will be carried out in each generation, although analysis can be carried out in alternate generations if desired.

[0252] In some cases, selection for other useful traits is also carried out, e.g., selection for fungal resistance or bacterial resistance. Selection for such other traits can be carried out before, during or after identification of individual plants that possess the desired polymorphic allele.

### VII. ARTICLES OF MANUFACTURE

[0253] Transgenic plants provided herein have various uses in the agricultural and energy production industries. For example, transgenic plants described herein can be used to make animal feed and food products. Such plants, however, are often particularly useful as a feedstock for energy production.

[0254] Transgenic plants described herein often produce higher yields of grain and/or biomass per hectare, relative to control plants that lack the exogenous nucleic acid. In some embodiments, such transgenic plants provide equivalent or even increased yields of grain and/or biomass per hectare relative to control plants when grown under conditions of reduced inputs such as fertilizer and/or water. Thus, such transgenic plants can be used to provide yield stability at a lower input cost and/or under environmentally stressful conditions such as drought. In some embodiments, plants described herein have a composition that permits more efficient processing into free sugars, and subsequently ethanol, for energy production. In some embodiments, such plants provide higher yields of ethanol, butanol, dimethyl ether, other biofuel molecules, and/or sugar-derived co-products per kilogram of plant material, relative to control plants. Such processing efficiencies are believed to be derived from the composition of the plant material, including, but not limited to, content of glucan, cellulose, hemicellulose, and lignin. By providing higher biomass yields at an equivalent or even decreased cost of production, the transgenic plants described herein improve profitability for farmers and processors as well as decrease costs to consumers.

[0255] Seeds from transgenic plants described herein can be conditioned and bagged in packaging material by means known in the art to form an article of manufacture. Packaging material such as paper and cloth are well known in the art. A package of seed can have a label, e.g., a tag or label secured to the packaging material, a label printed on the packaging material, or a label inserted within the package, that describes the nature of the seeds therein.

[0256] The invention will be further described in the following examples, which do not limit the scope of the invention described in the claims.

### VIII. EXAMPLES

### Example 1

### Transgenic Rice Plants

[0257] The following symbols are used in with respect to rice transformation: T₀: plant regenerated from transformed tissue culture; T₁: first generation progeny of self-pollinated T₀ plants; T₂: second generation progeny of self-pollinated T₁ plants; T₃: third generation progeny of self-pollinated T₂ plants.

[0258] The following is a list of nucleic acids that were isolated from Arabidopsis thaliana plants: CeresAnnot: 544549 (SEQ ID NO:262), CeresAnnot: 1355066 (SEQ ID NO:116), CeresClone: 1356785 (SEQ ID NO:252), CeresClone: 26006 (SEQ ID NO:594), CeresClone: 4831 (SEQ ID NO:76), CeresAnnot: 847799 (SEQ ID NO:208), and CeresAnnot: 878355 (SEQ ID NO:425). The following nucleic acids were isolated from Zea mays plants: CeresClone: 1384304 (SEQ ID NO:553). The following nucleic acids were isolated from Oryza sativa plants: antisense sequence (SEQ ID NO:678). CeresClone: 638126 (SEQ ID NO:322) was isolated from Glycine max plants.

[0259] Each isolated nucleic acid described above was cloned into a Ti plasmid vector containing a phosphinothricin acetyltransferase gene which confers Finale™ resistance to transformed plants. Constructs were made using the above mentioned nucleic acids that contained each operably linked to a 326 promoter construct was introduced into callus cells of the rice cultivar Kitaake by an Agrobacterium-mediated transformation protocol. Approximately 20-30 independent T₀ transgenic plants were generated from each transformation, as well as for the control plasmid (empty vector). Preliminary phenotypic analysis indicated that T₀ transformants did not show any significant phenotypic anomalies in vegetative organs, with a few exceptions where some plants appeared small with reduced fertility, most likely due to tissue culture effects.

[0260] T₀ plants were grown in a greenhouse, allowed to self-pollinate, and T₁ seeds collected. T₁ and T₂ plants were grown in a field. The presence of each construct was confirmed by PCR.

[0261] Rice seeds were soaked for 3-4 days before spring germination and transplanted to the field about one month later in Langfang, China. The distance between rows was 25 cm and the distance between plants was 15 cm. The combined fertilizer (16N-16P-16K) was applied at 25 kg/mu (666.7 m²) just before transplanting. 12.5 kg/mu of urea was applied at two times during the growing season prior to panicle development.

[0262] Ten plants were grown per transgenic event within one row. Only those rows that were visibly different from control plants were measured. Plant height was measured at maturity.

[0263] Biomass (Dry weight) measurements for CW00733, CW00710, CW00628, CW00604, CW00564, CW00469, and CW00536 were collected from T₁ plants that were grown. The stems with leaves and leaf sheaths but without panicles were dried in a greenhouse for at least a month, and then weighed for each plant (all tillers weighed together for each plant). Measurements for CW00191, CW00297, and CW00319 were collected from T₂ plants that were grown. The stems with leaves and leaf sheaths but with panicles separated were dried in a room for at least a month, and then weighed for each plant (all tillers weighed together for each plant). Tiller number was counted after 4 months of growth.

### Example 2

### Results for Rice Events CW00733, Ceres Clone:1384304, (SEQ ID NO: 553)

[0264] T₁ seed from one event of CW00733 containing CeresClone:1384304 was analyzed as described in Example 1. The plant height, biomass, and panicle weight of transgenic T₁ plants in comparison to plants not containing the transgene grown at the same location is shown in Table 1. Each table data row corresponds to a field row. The data points represent an average of 10 transgenic plants (1 row of same event) and an average of 40 control plants (4 rows). An increase in biomass, height and panicle weight was shown in comparison to plants not containing the transgene.

TABLE 1

| Plant Height (cm) | | Biomass (g)/plant | | Panicle wt (g)/plant | |
|---|---|---|---|---|---|
| Control | Transgenic | Control | Transgenic | Control | Transgenic |
| 72.41 | 80.30 | 16.70 | 27.45 | 21.56 | 28.89 |
| | | | | 24.58 | 23.42 |

[0265] The plant height (cm), yield (measured as g/per panicles of 16 plants), and biomass (measured as g of stem only (no inflorescence or root)) of transgenic T₂ CW00733 plants in comparison to plants not containing the transgene grown (WT) at the same location are shown in Table 2. Results from CW00604 events (Example 7) also are shown in Table 2. An increase in height and biomass was observed.

TABLE 2
T2 Plants from CW00733 and CW00604 events

| | Rep | WT | CW00604 | CW00733 |
|---|---|---|---|---|
| Height | Rep I | 80.3 | 81.3 | 85.0 |
| (cm) | Rep II | 73.3 | 79.7 | 84.5 |
| | Rep III | 77.2 | 79.1 | 82.9 |
| | Average | 76.9 | 80.0 | 84.1 |
| Yield | Rep I | 395.4 | 357.0 | 356.8 |
| | Rep II | 385.0 | 324.0 | 348.5 |
| | Rep III | 361.6 | 309.0 | 345.3 |
| | Average | 380.7 | 330.0 | 350.2 |
| Biomass | Rep I | 16.6 | 24.8 | 19.3 |
| | Rep II | 20.0 | 20.8 | 17.7 |
| | Rep III | 16.6 | 19.8 | 19.7 |
| | Average | 17.7 | 21.8 | 18.9 |

### Example 3

### Results for Rice Events CW00319, Ceres Annot: 544549 (SEQ ID NO: 262)

[0266] Biomass from plants grown from T₂ and T₃ seed from one event of CW00319 containing Ceres Annot: 544549 was analyzed as described in Example 1. The average biomass of transgenic T₂ and T₃ plants in comparison to plants not containing the transgene grown at the same location is shown in Table 3. The low nitrogen plots and control plots were each replicated 3 times in randomized block design, having transgenic plants representing multiple events and controls. Each plot contained 40 plants. Ten plants were measured per plot for one event of CW00319. Each of the biomass values presented in Table 3 represents an average of 30 plants measured. The results show a measured increase in biomass for transgenic plants under low nitrogen conditions in comparison to plants not containing the transgene.

TABLE 3

| | |
|---|---|
| Biomass (g)/plant (normal) | Biomass (g)/plant (Low N) |

| Control | Transgenic | Control | Transgenic |
|---|---|---|---|
| 14.6 | 14.38 | 16.01 | 17.44 |

### Example 4

### Results for Rice Events CW00710, Ceres Annot: 1355066 (SEQ ID NO: 116)

[0267] T₁ seed from one event of CW00710 containing Ceres Annot: 1355066 was analyzed as described in Example 1. The plant height, biomass, and panicle weight of transgenic T₁ plants in comparison to plants not containing the transgene grown at the same location is shown in Table 4. The table data row corresponds to a field row. The data points represent an average of 10 transgenic plants (1 row of same event) and an average of 40 control plants (4 rows). An increase in biomass and height was shown in comparison to plants not containing the transgene.

TABLE 4

| Plant Height (cm) | | Biomass (g)/plant | | Panicle wt (g)/plant | |
|---|---|---|---|---|---|
| Control | Transgenic | Control | Transgenic | Control | Transgenic |
| 72.20 | 85.60 | 14.51 | 24.15 | 19.38 | 18.70 |

### Example 5

### Results for Rice Events CW00628 (SEQ ID NO: 678)

[0268] T₁ seed from one event of CW00628 containing SEQ ID NO: 678 RNAi construct was analyzed as described in Example 1. The plant height, biomass, and panicle weight of transgenic T₁ plants in comparison to plants not containing the transgene grown at the same location is shown in Table 5. The table data row corresponds to a field row. The data points represent an average of 10 transgenic plants (1 row of same event) and an average of 40 control plants (4 rows). An increase in biomass and height was shown in comparison to plants not containing the transgene.

TABLE 5

| Plant Height (cm) | | Biomass (g)/plant | | Panicle wt (g)/plant | |
|---|---|---|---|---|---|
| Control | Transgenic | Control | Transgenic | Control | Transgenic |
| 75.30 | 81.60 | 15.92 | 29.96 | 24.53 | 20.38 |

### Example 6

### Results for Rice Events CW00297, Ceres Clone: 625057 (SEQ ID NO: 644)

[0269] Biomass from plants grown from T₂ and T₃ seed from one event of CW00297 containing Ceres Clone: 625057 was analyzed as described in Example 1. The average biomass of transgenic T₂ and T₃ plants in comparison to plants not containing the transgene grown at the same location is shown in Table 6. The low nitrogen plots and control plots were each replicated 3 times in randomized block design, having transgenic plants representing multiple events and controls. Each plot contained 40 plants. Ten plants were measured per plot for one event of CW00297. Each of the biomass values presented in Table 6 represents an average of 30 plants measured. The results show a measured increase in biomass for transgenic plants under normal and low nitrogen conditions in comparison to plants not containing the transgene.

TABLE 6

| | |
|---|---|
| Biomass (g)/plant (normal) | Biomass (g)/plant (Low N) |

| Control | Transgenic | Control | Transgenic |
|---|---|---|---|
| 14.6 | 15.93 | 16.01 | 17.35 |

### Example 7

### Results for Rice Events CW00604, Ceres Clone: 1356785 (SEQ ID NO:252)

[0270] T₁ seed from one event of CW00604 containing Ceres Clone: 1356785 was analyzed as described in Example 1. The plant height, biomass, and panicle weight of transgenic T₁ plants in comparison to plants not containing the transgene grown at the same location is shown in Table 7. Each table data row corresponds to a field row. The data points represent an average of 10 transgenic plants (1 row of same event) and an average of 40 control plants (4 rows). An increase in biomass, height and panicle weight was shown in comparison to plants not containing the transgene. An increase in height and biomass also was observed for T₂ plants. See Table 2.

TABLE 7

| Plant Height (cm) | | Biomass (g)/plant | | Panicle wt (g)/plant | |
|---|---|---|---|---|---|
| Control | Transgenic | Control | Transgenic | Control | Transgenic |
| 72.53 | 81.25 | 16.40 | 28.68 | 22.21 | 29.91 |
| 73.70 | 82.30 | | | | |

### Example 8

### Results for Rice Events CW00564, Ceres Clone: 638126 (SEQ ID NO: 322)

[0271] T₁ seed from one event of CW00564 containing Ceres Clone: 638126 was analyzed as described in Example 1. The plant height, biomass, and panicle weight of transgenic T₁ plants in comparison to plants not containing the transgene grown at the same location is shown in Table 8. The table data row corresponds to a field row. The data points represent an average of 10 transgenic plants (1 row of same event) and an average of 40 control plants (4 rows). An increase in biomass, height, and panicle weight was shown in comparison to plants not containing the transgene.

TABLE 8

| Plant Height (cm) | | Biomass (g)/plant | | Panicle wt (g)/plant | |
|---|---|---|---|---|---|
| Control | Transgenic | Control | Transgenic | Control | Transgenic |
| 72.88 | 85.44 | 18.11 | 36.47 | 22.56 | 37.47 |

[0272] The plant height (cm), yield (measured as g/per panicles of 16 plants), and biomass (measured as g of stem only (no inflorescence or root)) of transgenic T₂ CW00564 plants in comparison to plants not containing the transgene grown (WT) at the same location are shown in Table 9. Results from CW00469 events (Example 10) also are shown in Table 9. An increase in height, yield, and biomass was observed.

TABLE 9
T2 Plants from CW00564 and CW00469 events

| | Rep | WT | CW00469 | CW00564 |
|---|---|---|---|---|
| Height | Rep I | 77.3 | 117.1 | 90.7 |
| (cm) | Rep II | 76.9 | 117.7 | 91.5 |
| | Rep III | 77.4 | 113.1 | 92.7 |
| | Average | 77.2 | 115.9 | 91.6 |
| Yield | Rep I | 356.9 | 426.0 | 406.8 |
| | Rep II | 343.2 | 378.8 | 423.6 |
| | Rep III | 366.7 | 398.0 | — |
| | Average | 355.6 | 400.9 | 415.2 |
| Biomass | Rep I | 17.1 | 29.7 | 25.2 |
| | Rep II | 15.1 | 26.5 | 25.1 |
| | Rep III | 14.6 | 27.1 | 24.4 |
| | Average | 15.6 | 27.7 | 24.9 |

### Example 9

### Results for Rice Events CW00010, Ceres Clone: 26006 (SEQ ID NO: 594)

[0273] T₁ seed from three events of CW00010 containing Ceres Clone: 26006 was analyzed as described in Example 1. The plant height, biomass, tiller number, flowering time, and panicle weight of transgenic T₁ plants in comparison to plants not containing the transgene grown at the same location is shown in Tables 10, 11, and 12. The data points represent an average of 10 transgenic plants (1 row of same event) and an average of 40 control plants (4 rows). An increase in biomass, height, tiller number, and panicle weight was shown in comparison to plants not containing the transgene.

TABLE 10
Event 1

| | | | Number of plants |
|---|---|---|---|
| | Percent Increase | p value | measured |
| Biomass | 9 | 0.307 | 11 |
| Plant Height | 7 | 0.028 | 11 |
| Tiller Number | 27 | 0.002 | 10 |
| Flowering Time | 10 | 0.048 | 11 |
| Panicle weight | 16 | 0.012 | 39 |

TABLE 11
Event 17

| | | | Number of plants |
|---|---|---|---|
| | Percent Increase | P value | measured |
| Plant Height | 3 | 0.004 | 7 |
| Tiller Number | 34 | | 1 |
| Panicle weight | 4 | 0.591 | 7 |

TABLE 12
Event 2

| | | | Number of plants |
|---|---|---|---|
| | Percent Increase | p value | measured |
| Plant Height | 2 | 0.007 | 15 |
| Tiller Number | 27 | 0.013 | 10 |
| Panicle weight | 16 | 0.011 | 14 |

### Example 10

### Results for Rice Events CW00469, Ceres Clone: 4831 (SEQ ID NO: 76)

[0274] T₁ seed from one event of CW00469 containing Ceres Clone: 4831 was analyzed as described in Example 1. The plant height, biomass, and panicle weight of transgenic T₁ plants in comparison to plants not containing the transgene grown at the same location is shown in Table 13. The table data row corresponds to a field row. The data points represent an average of 10 transgenic plants (1 row of same event) and an average of 40 control plants (4 rows). An increase in biomass, height, and panicle weight was shown in comparison to plants not containing the transgene. An increase in height, yield, and biomass was shown in T₂ plants (see Table 9).

TABLE 13

| Plant Height (cm) | | Biomass (g)/plant | | Panicle wt (g)/plant | |
|---|---|---|---|---|---|
| Control | Transgenic | Control | Transgenic | Control | Transgenic |
| 76.54 | 112.22 | 25.44 | 56.06 | 32.63 | 62.70 |

### Example 11

### Results for Rice Events CW00536, Ceres Annot: 847799 (SEQ ID NO:208)

[0275] T₁ seed from 16 events of CW00536 containing Ceres Annot: 847799 was analyzed as described in Example 1. The plant height and panicle weight of transgenic T₁ plants in comparison to plants not containing the transgene grown at the same location is shown in Tables 14 and 15. The data points represent an average of 16 events with 15 transgenic plants per event and an average of several hundred control plants. An increase in height and panicle weight was shown in comparison to plants not containing the transgene.

TABLE 14
Panicle wt (g)/plant

| Control | STDEV | Transgenic | STDEV |
|---|---|---|---|
| 17.916 | 2.181 | 20.854 | 3.419 |

TABLE 15
Plant Height (cm)

| Event | Percent Increase over control |
|---|---|
| CW00536-03 | 7.79 |
| CW00536-05 | 5.66 |
| CW00536-11 | 8.71 |
| CW00536-12 | 8.47 |
| CW00536-20 | 8.77 |

### Example 12

### Results for Rice Events SR05004, CW00191, CeresAnnot:878355 (SEQ ID NO: 425)

[0276] Biomass from plants grown from T₂ and T₃ seed from one event of CW00191 containing CeresAnnot:878355 was analyzed as described in Example 1. The average biomass of transgenic T₂ and T₃ plants in comparison to plants not containing the transgene grown at the same location is shown in Table 16. The low nitrogen plots and control plots were each replicated 3 times in randomized block design, having transgenic plants representing multiple events and controls. Each plot contained 40 plants. Ten plants were measured per plot for one event of CW00191. Each of the biomass values presented in Table 16 represents an average of 30 plants measured. The results show a measured increase in biomass for transgenic plants under normal and low nitrogen conditions in comparison to plants not containing the transgene.

TABLE 16

| | |
|---|---|
| Biomass (g)/plant (normal) | Biomass (g)/plant (Low N) |

| Control | Transgenic | Control | Transgenic |
|---|---|---|---|
| 14.6 | 16.75 | 16.01 | 19.64 |

### Example 13

### Determination of Functional Homologs by Reciprocal BLAST

[0277] A candidate sequence was considered a functional homolog of a reference sequence if the candidate and reference sequences encoded proteins having a similar function and/or activity. A process known as Reciprocal BLAST (Rivera et al., Proc. Natl. Acad. Sci. USA, 95:6239-6244 (1998)) was used to identify potential functional homolog sequences from databases consisting of all available public and proprietary peptide sequences, including NR from NCBI and peptide translations from Ceres clones.

[0278] Before starting a Reciprocal BLAST process, a specific reference polypeptide was searched against all peptides from its source species using BLAST in order to identify polypeptides having BLAST sequence identity of 80% or greater to the reference polypeptide and an alignment length of 85% or greater along the shorter sequence in the alignment. The reference polypeptide and any of the aforementioned identified polypeptides were designated as a cluster.

[0279] The BLASTP version 2.0 program from Washington University at Saint Louis, Mo., USA was used to determine BLAST sequence identity and E-value. The BLASTP version 2.0 program includes the following parameters: 1) an E-value cutoff of 1.0e-5; 2) a word size of 5; and 3) the -postsw option. The BLAST sequence identity was calculated based on the alignment of the first BLAST HSP (High-scoring Segment Pairs) of the identified potential functional homolog sequence with a specific reference polypeptide. The number of identically matched residues in the BLAST HSP alignment was divided by the HSP length, and then multiplied by 100 to get the BLAST sequence identity. The HSP length typically included gaps in the alignment, but in some cases gaps were excluded.

[0280] The main Reciprocal BLAST process consists of two rounds of BLAST searches; forward search and reverse search. In the forward search step, a reference polypeptide sequence, “polypeptide A,” from source species SA was BLASTed against all protein sequences from a species of interest. Top hits were determined using an E-value cutoff of 10⁻⁵ and a sequence identity cutoff of 35%. Among the top hits, the sequence having the lowest E-value was designated as the best hit, and considered a potential functional homolog or ortholog. Any other top hit that had a sequence identity of 80% or greater to the best hit or to the original reference polypeptide was considered a potential functional homolog or ortholog as well. This process was repeated for all species of interest.

[0281] In the reverse search round, the top hits identified in the forward search from all species were BLASTed against all protein sequences from the source species SA. A top hit from the forward search that returned a polypeptide from the aforementioned cluster as its best hit was also considered as a potential functional homolog.

[0282] Functional homologs were identified by manual inspection of potential functional homolog sequences. Representative functional homologs for SEQ ID NO: 554, 263, 117, 1, 645, 253, 323, 595, 77, 209, and 426 are shown in FIGS. 1-11, respectively. Additional exemplary homologs are correlated to certain Figures in the Sequence Listing.

### Example 14

### Determination of Functional Homologs by Hidden Markov Models

[0283] Hidden Markov Models (HMMs) were generated by the program HMMER

[0284] 2.3.2. To generate each HMM, the default HMMER 2.3.2 program parameters, configured for global alignments, were used.

[0285] An HMM was generated using the sequences shown in FIG. 1 as input. These sequences were fitted to the model and a representative HMM bit score for each sequence is shown in the Sequence Listing. Additional sequences were fitted to the model, and representative HMM bit scores for any such additional sequences are shown in the Sequence Listing. The results indicate that these additional sequences are functional homologs of SEQ ID NO: 554.

[0286] The procedure above was repeated and an HMM was generated for each group of sequences shown in FIGS. 2-11, using the sequences shown in each Figure as input for that HMM. A representative bit score for each sequence is shown in the Sequence Listing. Additional sequences were fitted to certain HMMs, and representative HMM bit scores for such additional sequences are shown in the Sequence Listing. The results indicate that these additional sequences are functional homologs of the sequences used to generate that HMM.

### Other Embodiments

[0287] It is to be understood that while the invention has been described in conjunction with the detailed description thereof, the foregoing description is intended to illustrate and not limit the scope of the invention, which is defined by the scope of the appended claims. Other aspects, advantages, and modifications are within the scope of the following claims.

The application's sequence listing, which the Patent Office published only in electronic form, follows.

SEQUENCE LISTING (697 sequences)

SEQ ID NO: 1 - protein, 235 aa, Oryza sativa
  misc_feature (32)..(83): Pfam Name: AP2 Pfam Description: AP2 domain
  misc_feature: Bit score of 550.1 for HMM based on sequences of Figure 4
MAPRAATVEKVAVAPPTGLGLGVGGGVGAGGPHYRGVRKRPWGRYAAEIRDPAKKSRVWLGTYDTAEEAARAYDAAAREFRGAKAKTNFPFASQSMVGCGGSPSSNSTVDTGGGGVQTPMRAMPLPPTLDLDLFHRAAAVTAVAGTGVRFPFRGYPVARPATHPYFFYEQAAAAAAAEAGYRMMKLAPPVTVAAVAQSDSDSSSVVDLAPSPPAVTANKAAAFDLDLNRPPPVEN

SEQ ID NO: 2 - protein, 246 aa, Triticum aestivum
  misc_feature (32)..(83): Pfam Name: AP2 Pfam Description: AP2 domain
  misc_feature: Public GI ID no. 84795244
  misc_feature: Bit score of 566.8 for HMM based on sequences of Figure 4
  misc_feature: Functional Homolog Of SEQ ID NO. 1
MAPRAAEKAPVSPPTGLGLGLGGGVGVVAGGAHYRGVRKRPWGRYAAEIRDPAKKSRVWLGTYDTAEEAARAYDTAAREFRGAKAKTNFPFPSSSSSSPVAGAGGGGSPSSDSTLDSSGGGSGGCAQAPMQAIPLPPALDLDLFHRAAAVTAVAGGGMRFPFNGYPVAPRQPMHPYFFYEQAAAAAAAASGYRALKVAQPVTVAAVARSDSDSSSVVDLSPSPPAVTAHKAVAFDLDLNRPPPSED

SEQ ID NO: 3 - DNA, 1052 bp, Panicum virgatum
  misc_feature: Ceres Clone ID no. 1725396
  misc_feature: Encodes the peptide sequence at SEQ ID NO. 4
agactccatacacccaccctctctacgcgcagctcctcgctgaaccggaacacccgcacacacacgccacttggacaccatggcgccccgggcggcggacaagtcgccggtgccgccggccaccggcctcggtctcggcgtcggcggtgccgtcggaggcctgggcatgggcccgcactacaggggcgtgcggaagcgcccgtgggggcggtacgccgcggagatccgcgacccggccaagaagagccgcgtgtggctgggaacgtacgacaccgccgaggaggccgcccgcgcctacgacgctgccgcgcgcgacttccgcggcgccaaggccaagaccaacttcccgttcgcgtcccagtgccccgtcgccgccggcgccggcgccggcagccccagcagcaactgcaccgtggaatcgcgcggaggcggcagcggctacggcgtccaggcgcccatgcaggccatgccgctgcccccggccctcgatctcgatctcttccaccgggcggcggccgtgaccgcggtctcccccggcggcatgcggtttcccttcaaagggtaccctgtcgcgcgcccgaccccgaacccctacttcttctacgaacaggcggcagcggccgcggccgcggcggccggctaccggatgctcaaggtcgccccgccgccggtcaccgtggccgccgtcgcgcagagcgactccgactcctcgtcggtggttgatcgcaccccttcgccgcccgcggttgccgcaaaaaaggaggtctccttcgatctggatctgaactggccgccgccggcggagaactagccacacccaccagagtttttagctgacgacttcgtagtttctctttcctttttgccttgaggaatattacttctgttatttttttttggtcctctagcctgtagttttgttcagtagcctgtgagagacggagaagcctgtgtacatagtttttccgccagaggacggaattgatctgttgctttcccaccccataaaccataaacgcaaaaaaaaaaacatcacatttgaatggttctag

SEQ ID NO: 4 - protein, 243 aa, Panicum virgatum
  misc_feature (32)..(83): Pfam Name: AP2 Pfam Description: AP2 domain
  misc_feature: Ceres Clone ID no. 1725396
  misc_feature: Bit score of 585.0 for HMM based on sequences of Figure 4
  misc_feature: Functional Homolog Of SEQ ID NO. 1
MAPRAADKSPVPPATGLGLGVGGAVGGLGMGPHYRGVRKRPWGRYAAEIRDPAKKSRVWLGTYDTAEEAARAYDAAARDFRGAKAKTNFPFASQCPVAAGAGAGSPSSNCTVESRGGGSGYGVQAPMQAMPLPPALDLDLFHRAAAVTAVSPGGMRFPFKGYPVARPTPNPYFFYEQAAAAAAAAAGYRMLKVAPPPVTVAAVAQSDSDSSSVVDRTPSPPAVAAKKEVSFDLDLNWPPPAEN

SEQ ID NO: 5 - DNA, 729 bp, Sorghum bicolor
  misc_feature: Ceres Annot ID no. 8669118
  misc_feature: Encodes the peptide sequence at SEQ ID NO. 6
atggcgccccgggtggcggacaagtcgccgttgccgccggccaccggcctcggactgggcgttggcggagtagtcggaggcgtgggcatgggcccacactacagaggcgtgagaaagcggccgtggggacgtttcgccgctgagatccgcgaccctgccaagaaaagccgcgtgtggctaggcacgtacgacacggccgaggaggccgccaaggcctacgacgccgccgcccgcgagttccgaggcgccaaggccaagacgaacttcccgttcccgtctcagtgcgccgtcgccgccggcggtgctggcagcccctgcagcaacagcaccgttgactcgagcggcggcgccagcggctgtgccgtccaggcgcctatgcaggccatgccgctgcctccggccctcgatctcgatctcttccatcgggcggccgccgtgaacgcggtcaccgcaggcggcatgcggtttccgttcaagggctaccccgtcgcgcgtccaaccccgcaccagtacttcttctacgaacaggccgccgcagccgctgccgcggcggccggctaccggatgcttaaggtggccccaccgccggtcaccgtggccgccgtcgcgcagagtgattcggactcctcgtctgtggttgatcacaccccttcgcctcccgcggtgacggcaaagaaggaggtgggcttcgagctggatctgaactggccgccgccggcagagaactag

SEQ ID NO: 6 - protein, 242 aa, Sorghum bicolor
  misc_feature (32)..(83): Pfam Name: AP2 Pfam Description: AP2 domain
  misc_feature: Ceres Annot ID no. 8669118
  misc_feature: Bit score of 594.1 for HMM based on sequences of Figure 4
  misc_feature: Functional Homolog Of SEQ ID NO. 1
MAPRVADKSPLPPATGLGLGVGGVVGGVGMGPHYRGVRKRPWGRFAAEIRDPAKKSRVWLGTYDTAEEAAKAYDAAAREFRGAKAKTNFPFPSQCAVAAGGAGSPCSNSTVDSSGGASGCAVQAPMQAMPLPPALDLDLFHRAAAVNAVTAGGMRFPFKGYPVARPTPHQYFFYEQAAAAAAAAAGYRMLKVAPPPVTVAAVAQSDSDSSSVVDHTPSPPAVTAKKEVGFELDLNWPPPAEN

SEQ ID NO: 7 - DNA, 994 bp, Zea mays
  misc_feature: Ceres Clone ID no. 280241
  misc_feature: Encodes the peptide sequence at SEQ ID NO. 8
aagacgcaatacacatacaccccctcttgcccacaccacctcgctgaaccggaagacccgcacacacacgccacttgtagaccatggcgccccgggtggcggacaagtcgcctctaccgccggccaccggcctggggctgggcgttggcggaggagtcggaggcgtgggcatgggcccgcactacagaggcgtgaggaagcgtccatggggacgctacgccgccgagatccgcgaccctgccaagaaaagccgcgtgtggctcggcacgtacgacacggccgaggaggccgccaaggcgtacgattccgccgcccgcgagttccgaggcgccaaggccaagacgaacttcccgttcccctcccagtgctccgtcgcctccgttgctgccggtagcgctagtagcaacagcaccgtggattcgagcggtggcggtagcggctgtggcatccaggcgcctatgcaggccatgccgcttcctccggctctcgatctcgacctcttccatcgggcggccgccgtgaacgcagtctccaccggcatgcggtttccgttcaagggctatcctgtcgcctgcccgacgccacagcagtactttttctacgagcaggcagcggccgcggctgccgcggcatccggataccggatgctcaaggtcgccccaccggccgtgactgtggccgcggtggcgcagagcgactccgactcgtcgtctgtggttgatcactccccttcgcctcccgcggtgacggaaaacaaggtgggcttcgaactggatctgaactggcccccgccggcagagaactaggcaggccgaagtttttggctgacgacttagtagcttctttttcccttttgccttcatcaggaatgttacttgtggttgtttggtcctgtatggctgtattcttgttctgtagactaagagatggggagtcttgtaaatattttttttccgtcgagacggaaatgaactgagatctgttcgtctgtccg

SEQ ID NO: 8 - protein, 240 aa, Zea mays
  misc_feature (32)..(83): Pfam Name: AP2 Pfam Description: AP2 domain
  misc_feature: Ceres Clone ID no. 280241
  misc_feature: Bit score of 586.0 for HMM based on sequences of Figure 4
  misc_feature: Functional Homolog Of SEQ ID NO. 1
MAPRVADKSPLPPATGLGLGVGGGVGGVGMGPHYRGVRKRPWGRYAAEIRDPAKKSRVWLGTYDTAEEAAKAYDSAAREFRGAKAKTNFPFPSQCSVASVAAGSASSNSTVDSSGGGSGCGIQAPMQAMPLPPALDLDLFHRAAAVNAVSTGMRFPFKGYPVACPTPQQYFFYEQAAAAAAAASGYRMLKVAPPAVTVAAVAQSDSDSSSVVDHSPSPPAVTENKVGFELDLNWPPPAEN

SEQ ID NO: 9 - DNA, 805 bp, Musa acuminata
  misc_feature: Ceres Clone ID no. 1712594
  misc_feature: Encodes the peptide sequence at SEQ ID NO. 10
atcgcggaaaccgaaacagagggagaggatcgaacagtcgaaagaaaggcgtgtgagcttggttccttttccatggctccaagggggaagctcagcaccgtcgccgacggtgaagggaaggagatgcgtttccgaggggtgaggaagcggccgtggggccggtacgccgccgagatacgcgaccccagcaagaagacccgagtctggctcggtaccttcgacaccgcagaggaggccgccagagcctacgacaacgccgcccgcgatttccgcggcgccaaggccaagaccaacttcgccttctcagacgcctgcagcagccccagcgccgtcccggctgccactggcagccccagtagccagagcagcaccgtggaatcctcaggccgcgaggtggctgcggcggcggtgcctccactcgctgttccgctcccaccctccctcgatctgggcctcctctaccgcggcggaaccggcggtcgcttcccctttcagtcatacccaaccgccgccccgtcggcccagcagttctttttcctggacgcaaagtcggccacgaataaccgccagctggccctttgcccgccgatgttcgtcgcctgcttccagccgccgcccgccgtggccgtgcagagcgactccgactcctcctccgtcgtagatctccacccggactatcgctctcctcctccgcaggcgaaggcgttccctctcgctttcgacctcaacctccctccgccggaggagatcgtgtgactcggaagccgtcagaccgtcccccaaactcttccactcctctgatatc

SEQ ID NO: 10 - protein, 227 aa, Musa acuminata
  misc_feature (18)..(69): Pfam Name: AP2 Pfam Description: AP2 domain
  misc_feature: Ceres Clone ID no. 1712594
  misc_feature: Bit score of 504.5 for HMM based on sequences of Figure 4
  misc_feature: Functional Homolog Of SEQ ID NO. 1
MAPRGKLSTVADGEGKEMRFRGVRKRPWGRYAAEIRDPSKKTRVWLGTFDTAEEAARAYDNAARDFRGAKAKTNFAFSDACSSPSAVPAATGSPSSQSSTVESSGREVAAAAVPPLAVPLPPSLDLGLLYRGGTGGRFPFQSYPTAAPSAQQFFFLDAKSATNNRQLALCPPMFVACFQPPPAVAVQSDSDSSSVVDLHPDYRSPPPQAKAFPLAFDLNLPPPEEIV

SEQ ID NO: 11 - protein, 222 aa, Glycine max
  misc_feature (24)..(75): Pfam Name: AP2 Pfam Description: AP2 domain
  misc_feature: Public GI ID no. 190361125
  misc_feature: Bit score of 519.9 for HMM based on sequences of Figure 4
  misc_feature: Functional Homolog Of SEQ ID NO. 1
MAPRDHKTSNAKANGNGNSGVKEVHFRGVRKRPWGRYAAEIRDPGKKSRVWLGTFDTAEEAARAYDAAAREFRGPKAKTNFPLPLENVKNSSPSQSSTVESSSRDRDVAADSSPLDLNLAPAAAASARFPFQHQFPVFTGAVPAANQVLYFDAVLRAGMAGPRGFAFGYNHHPVAASEFHATTSDSDSSSVIDLNHNEGEVKGNGSRIFDLDLNHPPPHEIA

SEQ ID NO: 12 - protein, 239 aa, Stylosanthes hamata
  misc_feature (19)..(70): Pfam Name: AP2 Pfam Description: AP2 domain
  misc_feature: Public GI ID no. 4099921
  misc_feature: Bit score of 540.5 for HMM based on sequences of Figure 4
  misc_feature: Functional Homolog Of SEQ ID NO. 1
MAPREKTPAVKVNAGVKEVHFRGVRKRPWGRYAAEIRDPGKKSRVWLGTFDTAEDAARAYDAAAREFRGPKAKTNFPFPDSDDINSNNNNIVVVKNNNRSPSQSSTVESSSRDRDSYSAAAAATAVADSSPLDLNLAPAGAGFAGSIRFPFQQPFAVFPGGMPAAKQALYLDAVLRASMASHGQFGFGYNRPAAAAAGAQSDSDSSSVIDLNQNEGDVAKNNGRGLVLDLNEPPPQEMA

SEQ ID NO: 13 - protein, 220 aa, Vitis vinifera
  misc_feature (20)..(71): Pfam Name: AP2 Pfam Description: AP2 domain
  misc_feature: Public GI ID no. 147844573
  misc_feature: Bit score of 510.1 for HMM based on sequences of Figure 4
  misc_feature: Functional Homolog Of SEQ ID NO. 1
  misc_feature (81)..(81): Xaa is any aa, unknown, or other
  misc_feature (88)..(88): Xaa is any aa, unknown, or other
MAPRDKPTGVTAGATGNKEIRYRGVRKRPWGRYAAEIRDPGKKSRVWLGTFDTAEEAARAYDAAAREFRGAKAKTNFPSPXDLAAAAXTTANRSPSQSSTVESSSREALSPGAIAGPPALDLNLSHPAAAGQFSAVRYPAVGVFPIAQPLFFFEPFSRPEKPKTHRDMFDLDRAVADFHPAIAGSVHSDSDSSSVVDFNYHDRSTRLLNLDLNHPPAEVA

SEQ ID NO: 14 - protein, 258 aa, Jatropha curcas
  misc_feature (29)..(80): Pfam Name: AP2 Pfam Description: AP2 domain
  misc_feature: Public GI ID no. 67906426
  misc_feature: Bit score of 587.1 for HMM based on sequences of Figure 4
  misc_feature: Functional Homolog Of SEQ ID NO. 1
MESKNRKWLQERSNSTGNNLNQNSNTAETRYRGVRKRPWGRYAAEIRDPGKKTRVWLGTFDTAEEAARAYDAAAREFRGSKAKTNFPTVTELNNAAAAAVAAGAVTVARSPSQSSTVESSSPTPPRAASPPPPLDLTLNIPSHQHHHLRHGHFPTGVIFPGGAWISLAAEAHPVFFFDAFSVQGESNNNNKNNIINNNKIHSKNINLCRLDRTVMVSSGVHSDSDSSSVVVDYDHDRSPCNKGLSLDLDLNFPPAEVA

SEQ ID NO: 15 - protein, 225 aa, Nicotiana tabacum
  misc_feature (25)..(76): Pfam Name: AP2 Pfam Description: AP2 domain
  misc_feature: Public GI ID no. 57012757
  misc_feature: Bit score of 527.9 for HMM based on sequences of Figure 4
  misc_feature: Functional Homolog Of SEQ ID NO. 1
MAVKNKVSNGNLKGGNVKTDGVKEVHYRGVRKRPWGRYAAEIRDPGKKSRVWLGTFDTAEEAAKAYDTAAREFRGPKAKTNFPSPTENQSPSHSSTVESSSGENGVHAPPHAPLELDLTRRLGSVAADGGDNCRRSGEVGYPIFHQQPTVAVLPNGQPVLLFDSLWRAGVVNRPQPYHVTPMGFNGVNAGVGPTVSDSSSAVEENQYDGKRGIDLDLNLAPPMEF

SEQ ID NO: 16 - protein, 235 aa, Oryza sativa subsp. indica
  misc_feature (32)..(83): Pfam Name: AP2 Pfam Description: AP2 domain
  misc_feature: Public GI ID no. 56567583
  misc_feature: Bit score of 545.8 for HMM based on sequences of Figure 4
  misc_feature: Functional Homolog Of SEQ ID NO. 1
MAPRAATVEKVAVAPPTGLGLGVGGGVGAGGPHYRGVRKRPWGRYAAEIRDPAKKSRVWLGTYDTAEEAARAYDAAAREFRGAKAKTNFPFASQSMVGCGGSPSSNSTVDTGGGGVQTPMRAMPLPPTLDLDLFHRAAAVTAVAGTGVRFPFRGYPVARPATHPYFFYEQAAAVAAAEAGYRMMKLAPPVTVAAVAQSDSDSSSVVDLAPSPPAVTANKAAAFDLDLNRPPPVEN

SEQ ID NO: 17 - protein, 246 aa, Triticum aestivum
  misc_feature (32)..(83): Pfam Name: AP2 Pfam Description: AP2 domain
  misc_feature: Public GI ID no. 84795246
  misc_feature: Bit score of 560.2 for HMM based on sequences of Figure 4
  misc_feature: Functional Homolog Of SEQ ID NO. 1
MAPRAAEKAPVSPPTGLGLGVGGGIGVVAGGAHYRGVRKRPWGRYAAEIRDPAKKSRVWLGTYDTAEEAARAYDTAAREFRGAKAKTNFPFPSSSLSPVAAAGGGGGSPSSDSTLDSSGGGSGGCAQAPMQAIPLPPALDLDLFHRAAVVTAVAGGGMRFPFNGYPVAPRQPMHPYFFYEQAAAAAAAASGYRALKVAQPVTVAAVARSDSDSSSVVDLSPSPPAVTAHKAVAFDLDLNRPPPSED

SEQ ID NO: 18 - protein, 247 aa, Triticum aestivum
  misc_feature (32)..(83): Pfam Name: AP2 Pfam Description: AP2 domain
  misc_feature: Public GI ID no. 84795248
  misc_feature: Bit score of 552.7 for HMM based on sequences of Figure 4
  misc_feature: Functional Homolog Of SEQ ID NO. 1
MAPRAAEKAPVSPPTGLGLGVGGGIGVVAGGAHYRGVRKRPWGRYAAEIRDPAKKSRVWLGTYDTAEEAARAYDTAAREFRGAKAKTNFPFPSSSLSPVAAAGGGGGSPSSDSTLDSSGGGSGGCAQAPMQAIPLPPALDLDLFHRAAVVTAVAGGGMRFPFNGYPVAPRQPLHPYFFYEQAAAAAAASASGYRALKVAQPVTVAAVAQSDSDSSSVVDLSPSPPAVTAHKAVAFDLDLNRPPPSED

SEQ ID NO: 19 - DNA, 1072 bp, Panicum virgatum
  misc_feature: Ceres Clone ID no. 1805203
  misc_feature: Encodes the peptide sequence at SEQ ID NO. 20
ataccccacacacacccccaccctctctgccctgagctcttcgccgaaccggaacgcccgcacacccacgccacttgtacaccatggcgccccgggcggcgcacaagtcgccggtgccgccggccaccggcctcggtctcggcgtcgtcggtggcgtgggcatgggcccgcacttcaggggcgtgcggaagcgcccgtgggggcggtacgccgcggagatccgcgacccggccaagaagagccgcgtctggcttggcacgtacgacacggccgaggaggccgcccgcgcctacgacgccgccgcgcgcgagttccgcggcgccaaggccaagaccaacttcccgttcgcgtccaagtgccccgtcgccgccggcgccggcagccccagcagcaacagcaccgtggagtcgggcggaggcggcggcggctgcggcgtccaggcgcctatgctggccatgccgctgcccccggccctcgatctcgatctcttccgccgggcggcggccgtgaccgcggtctcccccggcggcatgcggtttcccttcaaagggtaccctgtcgcgcgcccgaccccgaacccctacttctacgaacaggtggccgcggccgccgccgcggcgtccggctaccggatgctcaaggtcgccccgccgccggtcaccgcggccgccgtcgcgcagagcgactccgactcctcgtcggtggtcgatcacaccccttcgccgcccgcggttaccgcgaagaaggaggtctccttcgatctggatctgaactggccgccgccggcggagaactagccacaccagagtttttagctgacgacttcgtagtttctctttcctttttgcctcgaggaatattacttctgttgtttttttggtcctctagcctgtagtttttgttcagtagcctgcgagagacggaggagcctgtgtaaatagtttttccgccgagggcggaattgatctgagatctgttcgtctgtctagacagatcaaaccggcgctgatatggagtaaattatgtactactagtatttcattccattagcatcaagcggatattattattc

SEQ ID NO: 20 - protein, 237 aa, Panicum virgatum
  misc_feature (29)..(80): Pfam Name: AP2 Pfam Description: AP2 domain
  misc_feature: Ceres Clone ID no. 1805203
  misc_feature: Bit score of 558.6 for HMM based on sequences of Figure 4
  misc_feature: Functional Homolog Of SEQ ID NO. 1
MAPRAAHKSPVPPATGLGLGVVGGVGMGPHFRGVRKRPWGRYAAEIRDPAKKSRVWLGTYDTAEEAARAYDAAAREFRGAKAKTNFPFASKCPVAAGAGSPSSNSTVESGGGGGGCGVQAPMLAMPLPPALDLDLFRRAAAVTAVSPGGMRFPFKGYPVARPTPNPYFYEQVAAAAAAASGYRMLKVAPPPVTAAAVAQSDSDSSSVVDHTPSPPAVTAKKEVSFDLDLNWPPPAEN

SEQ ID NO: 21 - DNA, 864 bp, Zea mays
  misc_feature: Ceres Clone ID no. 101497672
  misc_feature: Encodes the peptide sequence at SEQ ID NO. 22
tcgctgtaccagaagacccgcacacacacgccacttgtattaccatggcgccccgggtggcggacaagtcgccgctaccgccggccaccggcctggggctgggcgttggcggaggagtcgggggcgtgggcatgggcccgcactacagaggcgtgaggaagcgtccatggggacgctacgccgccgagatccgcgaccctgccaagaaaagccgtgtgtggctcggcacgtacgacacggccgaggaggccgccaaggcgtacgattccgccgcccgcgagttccgaggcgccaaggccaagacgaacttcccgttcccctcccagtgctccgtcgcctccgttgctgccggtagcgctagtagcaacagcaccgtggattcgagcggtggcggtagcggctgtggcatccaggcgcctatgcaggccatgccgcttcctccggctytcgatctcgrcctcttccatcgggcggccgccgtgaacgcagtctcccccggcatgcggtttccgttcaagggctatcctgtcgcctgcccgacgccccagcagtactttttctacgagcaggcagcggccgcggctgccgcggcatccggataccggatgctcaaggtcgctcccccggccgtgactgtggccgcggttgcgcagagcgactccgactcgtcgtctgtggttgatcactccccttcgcctcccgcggtgacggaaaacaaggtgggcttcgaactggatctgaactggcccccgccggcagagaactaggcaggccggagtttttggctgacgacttagtagcttctttttcccttttgccttcatcaggaatgttacttgtggttgtttggtcctgtatggctgt

SEQ ID NO: 22 - protein, 240 aa, Zea mays
  misc_feature (32)..(83): Pfam Name: AP2 Pfam Description: AP2 domain
  misc_feature: Ceres Clone ID no. 101497672
  misc_feature: Bit score of 569.4 for HMM based on sequences of Figure 4
  misc_feature: Functional Homolog Of SEQ ID NO. 1
  misc_feature (135)..(135): Xaa is any aa, unknown, or other
  misc_feature (138)..(138): Xaa is any aa, unknown, or other
MAPRVADKSPLPPATGLGLGVGGGVGGVGMGPHYRGVRKRPWGRYAAEIRDPAKKSRVWLGTYDTAEEAAKAYDSAAREFRGAKAKTNFPFPSQCSVASVAAGSASSNSTVDSSGGGSGCGIQAPMQAMPLPPAXDLXLFHRAAAVNAVSPGMRFPFKGYPVACPTPQQYFFYEQAAAAAAAASGYRMLKVAPPAVTVAAVAQSDSDSSSVVDHSPSPPAVTENKVGFELDLNWPPPAEN

SEQ ID NO: 23 - DNA, 1059 bp, Zea mays
  misc_feature: Ceres Clone ID no. 224845
  misc_feature: Encodes the peptide sequence at SEQ ID NO. 24
ctagacgccacacacacacatcgcttctccacacgacctcgctgaaccggaagacccgcacacacacgccacttgtgcaccatggcgccccgggtggcggacaagtcgccattgccgctggccaccggcctgaagctgggcgtaggcggaggcatgggcctgggtccacactaccgaggcgtgaggaagcggccgtggggacgttacgccgcggagatccgcgacccagccaagaagagtcgcgtgtggctgggcacgtacgacacggccgaggaggccgccaaggcctacgacgtcgccgcccgcgagttccgtggcgccaaggccaagactaacttcccgttccccctcgccgtcgccgtcgccgtcgccggcggtgctggtagccccagcagcgacagcaccaccttggaatcgagctgtggcggcagcgggtgtggcgtcgaagcgcctgtgcaggcggccatgccgctgaccccggccctcgacctcgatctcttccaccgggcggccgccgtcagcgcggtcaccaccggcggcatgccctttccgttcaaggccttccccgtcgtgcgcccgaccccacatcagtacttcctctacaatcaggccgcggcggccgcggcagccgggtacaggatggtcaaggtcgcctcagctccagtcaccgtagccgccgtcgcgcagagcgactccgactcctcgtctgtggttgatcgcacctgttcgcctcccgcggtgacggcaaagaaggaggtcagcttcgaactggatctgaactggccgccgccggcagagaactagtcgcaccggagttttcagctgacgactttgcagtttcctttttcccttttggccttcatcaggaattgtagtgtagctctgggtgtttggtcttttttttttcttgcatgtagagtgtagactatgatatggtggagccttgtacatagtactgtagtgttttttttttccgccgagacggagtagatctgttcgtgtgtctggacagatcaaaccggcgttgatatgggctttaaaccatggagcatgttgatt

SEQ ID NO: 24 - protein, 240 aa, Zea mays
  misc_feature (29)..(80): Pfam Name: AP2 Pfam Description: AP2 domain
  misc_feature: Ceres Clone ID no. 224845
  misc_feature: Bit score of 487.2 for HMM based on sequences of Figure 4
  misc_feature: Functional Homolog Of SEQ ID NO. 1
MAPRVADKSPLPLATGLKLGVGGGMGLGPHYRGVRKRPWGRYAAEIRDPAKKSRVWLGTYDTAEEAAKAYDVAAREFRGAKAKTNFPFPLAVAVAVAGGAGSPSSDSTTLESSCGGSGCGVEAPVQAAMPLTPALDLDLFHRAAAVSAVTTGGMPFPFKAFPVVRPTPHQYFLYNQAAAAAAAGYRMVKVASAPVTVAAVAQSDSDSSSVVDRTCSPPAVTAKKEVSFELDLNWPPPAEN

SEQ ID NO: 25 - protein, 236 aa, Oryza sativa subsp. japonica
  misc_feature (36)..(87): Pfam Name: AP2 Pfam Description: AP2 domain
  misc_feature: Public GI ID no. 115464685
  misc_feature: Bit score of 429.0 for HMM based on sequences of Figure 4
  misc_feature: Functional Homolog Of SEQ ID NO. 1
MAPRTSDKTMSPAAAATGLALGVGGVAGAAAVGTGQHFRGVRKRPWGRYAAEIRDPAKKSRVWLGTFDTAEEAARAYDAAAREYRGAKAKTNFPYPNGAPAAGVNSGSSNSSTVESFGSDVQAPMKAMPIPPSLELDLFHRAAAAAAAGAGGMRFPFEGYPVSHPYYFFGQAAAAAAASGCRMLKIAPAPVTVAALAQSDSDSSSIVDLAPSPPAALAKKAIAFDLDLNCPPPMEV

SEQ ID NO: 26 - DNA, 1065 bp, Zea mays
  misc_feature: Ceres Clone ID no. 1287030
  misc_feature: Encodes the peptide sequence at SEQ ID NO. 27
aaaaatcccagacgccacgccacccaacacatacaaacacacgcacgcgcgcgcgcgcgcctcccgctgttccgcaaaacaaaggaaacgaaggagaggaggccatggcgccgagaacgtcagagaaaaccatggcaccggcggcggccgctgccacggggctcgcgctcagcgtcggcggcggcggcggggccggcggcccgcactacagaggcgtgaggaagcggccgtggggccggtacgcggcggagatccgcgacccggcgaagaagagccgggtgtggctcggcacctacgacacggccgaggacgccgcgcgggcctacgacgccgccgcgcgcgagtaccgcggcgccaaggccaagaccaacttcccttacccctcgtgcgtgcccctctccgcagccggttgccggagcagcaacagcagcaccgtcgagtccttcagcagcgacgcgcaggcgcccatgcaggccatgccgctcccgccgtcgctcgagctggacctgttccaccgcgcggcggccgcggccacgggcacgggcgctgccgccgtacgcttccctttcggcagcatccccgttacgcacccgtactacttcttcgggcaggccgcagccgcagccgcggaagcagggtgccgtgtgctcaagctggcgccggcggtcaccgtggcgcagagcgactccgactgttcgtcggtagtggatctgtcgccgtcgccaccggccgctgtgtcggcgaggaagcccgccgcgttcgatctcgacctgaactgctcaccgccgacggaggcggaagcctagtcgtcgaagcttttaatgactgtctgtcttcttagttctttcttctcctttttctcgaggaaaattcggtactactaagctgagagacgctctcctccgacagacgacgtcgacgacgggcatttttgtaaatagtttttgcgccgggacctttttagtttatgatgaaagctgtattgtcaccgaagacaggtcctgccggcgttgttatggaccggattactatattatattatgcactactagtattttgatagcc

SEQ ID NO: 27 - protein, 233 aa, Zea mays
  misc_feature (33)..(84): Pfam Name: AP2 Pfam Description: AP2 domain
  misc_feature: Ceres Clone ID no. 1287030
  misc_feature: Bit score of 386.2 for HMM based on sequences of Figure 4
  misc_feature: Functional Homolog Of SEQ ID NO. 1
MAPRTSEKTMAPAAAAATGLALSVGGGGGAGGPHYRGVRKRPWGRYAAEIRDPAKKSRVWLGTYDTAEDAARAYDAAAREYRGAKAKTNFPYPSCVPLSAAGCRSSNSSTVESFSSDAQAPMQAMPLPPSLELDLFHRAAAAATGTGAAAVRFPFGSIPVTHPYYFFGQAAAAAAEAGCRVLKLAPAVTVAQSDSDCSSVVDLSPSPPAAVSARKPAAFDLDLNCSPPTEAEA

SEQ ID NO: 28 - DNA, 774 bp, Sorghum bicolor
  misc_feature: Ceres Annot ID no. 8733383
  misc_feature: Encodes the peptide sequence at SEQ ID NO. 29
atggcgccgagaacgtcagagaaaacgatgacaccggcggcggcggctgccgccacggggctcgcgcttagcgtcagcggcggagccggagccagcggcccgcacttcagaggcgtcaggaagcggccgtggggccggtacgccgcggagatccgcgacccggccaagaagagccgcgtgtggctcggcacgttcgacacggccgaggaggctgcgcgggcctacgacgccgccgcgcgcgactaccgcggcccaaaggccaagaccaacttccctttcccttcgtcgtgcatgccactcgccgccggcgccggcgccggcagcttgcctgcggcgaaggccgtcaccggtggcggcggcagccggagcagcaacagcagcaccgtcgagtctttcagcagcggcagcgacgtgcaggcggcgcccatgcaggccatgccgctcccaccgtctctggagctcgacctgttccaccgcgcggcggctgcgggcacgggcacgggcggcgccgccgtacggttccctttcaacagctaccccgtgacgcacccgtactatttcttcgggcaggccgctgctgccgcggcggcagggtgccacatgctcaagctggcaccgacggtgaccgtggcggccgtggcgcagagcgactccgactcctcgtcggtcgtggatctgtcgccatcgccgccggccgccgtgtcgacgcagaaggccgccgccgcgttcgatcttgacctgaactgcccaccgccggcggagatggaggcctag

SEQ ID NO: 29 - protein, 257 aa, Sorghum bicolor
  misc_feature (34)..(85): Pfam Name: AP2 Pfam Description: AP2 domain
  misc_feature: Ceres Annot ID no. 8733383
  misc_feature: Bit score of 425.4 for HMM based on sequences of Figure 4
  misc_feature: Functional Homolog Of SEQ ID NO. 1
MAPRTSEKTMTPAAAAAATGLALSVSGGAGASGPHFRGVRKRPWGRYAAEIRDPAKKSRVWLGTFDTAEEAARAYDAAARDYRGPKAKTNFPFPSSCMPLAAGAGAGSLPAAKAVTGGGGSRSSNSSTVESFSSGSDVQAAPMQAMPLPPSLELDLFHRAAAAGTGTGGAAVRFPFNSYPVTHPYYFFGQAAAAAAAGCHMLKLAPTVTVAAVAQSDSDSSSVVDLSPSPPAAVSTQKAAAAFDLDLNCPPPAEMEA

SEQ ID NO: 30 - protein, 236 aa, Triticum aestivum
  misc_feature (36)..(87): Pfam Name: AP2 Pfam Description: AP2 domain
  misc_feature: Public GI ID no. 84795240
  misc_feature: Bit score of 405.9 for HMM based on sequences of Figure 4
  misc_feature: Functional Homolog Of SEQ ID NO. 1
MAPRTSDKTATPPAAGAAATGLALGVGGGNGGGVGPHYRGVRKRPWGRYAAEIRDPAKKSRVWLGTYDTAEEAARAYDAAAREYRGNKAKTNFPFATASAPPAAAAALTVDGSRSSNSSTVESFGGDVQAPMQAMPLPPSLDLDLFHRAATSTAGAGMRFPFSGYPVSHPYYFFGQAAAAAAAGCHMYSQAPKVTVASVSPSDSDSSSVVDLAPSPPARKPVPFELDLNCPPPAEL

SEQ ID NO: 31 - DNA, 1048 bp, Panicum virgatum
  misc_feature: Ceres Clone ID no. 1806017
  misc_feature: Encodes the peptide sequence at SEQ ID NO. 32
aagcctagacgccaccccctcctcccctacacacacgccgcaggcgcgcgcctcccgcacaaaggaaaagaacgaggccatggcgccgagaacgtcggagaaaacgatggcaccggcggcgtccccggggctcgcgctcggcgtcggcggcggcggcggcccgcacttccgcggcgtcaggaagcgcccgtggggccggttcgcggcggagatccgcgacccggccaagaagagccgcttgtggctcggcacgttcgacacggccgaggaggccgcgcgggcctacgacgccgccgcgcgcgagtaccgcggcgccaaggccaagaccaacttcccctacccttcgtcggcgtccgtgcccccggccgccaccgccggcagccggagcggcgacagcagcaccgtggagtccttcggcggcgacgtgcaggcgcccatgcaggccatgccgctgccgccgtcgctcgagctggacctgttccaccgcgcggcggccgcgggcgccggcgccggcgtgcgcttcccgttcagcggctaccccgtgacgcacccctactacatcttcagccaggccgccgcggccgccgccgcggggtgccacatgcagctgaagctgccgccgacggtgaccgtggcggccgtggtgcaaagcgactccgactcctcgtcggtcgtggacctgtcgccgccgccgctcgccgccgccgggtcggcgaagaaggcctccgcgttcgatctcgatctgaactccccgccgccggcggaggcggaggcctagtagccggagtttagctgatgactggcactagttcctttcttcgtttcttccttcgcctttttcccctagaagaaacttggctgtatgtttacgcgtaggccctctctcttaccagaccagagagggaggacatttttgtaaatagtttttccgccggggatctaagctctagctgatgataaaaaaaaaagctgtattgtcatccaagacaggtcctgccggcgttgtcatggaccggattatattaattaattaagtgttttgatagtc

SEQ ID NO: 32 - protein, 232 aa, Panicum virgatum
  misc_feature (28)..(79): Pfam Name: AP2 Pfam Description: AP2 domain
  misc_feature: Ceres Clone ID no. 1806017
  misc_feature: Bit score of 405.8 for HMM based on sequences of Figure 4
  misc_feature: Functional Homolog Of SEQ ID NO. 1
MAPRTSEKTMAPAASPGLALGVGGGGGPHFRGVRKRPWGRFAAEIRDPAKKSRLWLGTFDTAEEAARAYDAAAREYRGAKAKTNFPYPSSASVPPAATAGSRSGDSSTVESFGGDVQAPMQAMPLPPSLELDLFHRAAAAGAGAGVRFPFSGYPVTHPYYIFSQAAAAAAAGCHMQLKLPPTVTVAAVVQSDSDSSSVVDLSPPPLAAAGSAKKASAFDLDLNSPPPAEAEA

SEQ ID NO: 33 - protein, 236 aa, Triticum aestivum
  misc_feature (36)..(87): Pfam Name: AP2 Pfam Description: AP2 domain
  misc_feature: Public GI ID no. 84795242
  misc_feature: Bit score of 404.0 for HMM based on sequences of Figure 4
  misc_feature: Functional Homolog Of SEQ ID NO. 1
MAPRTSDKTATPPAAGAAATGLALGVGGGNGGGVGTHYRGVRKRPWGRYAAEIRDPAKKSRVWLGTYDTAEEAARAYDAAAREYRGNKAKTNFPFASASAPPAAAAALTGDGSRSSNSSTVESFGGDVQAPMQAMPLPPSLELDLFHRAATSTAGAGMRFPFSGYPVSHPYYFFGQAAAAAAAGCHMYSQAPKVTVASVSPSDSDSSSVVDLAPSPPTRKPVPFDLDLNCPPPAEL

SEQ ID NO: 34 - protein, 240 aa, Triticum aestivum
  misc_feature (37)..(88): Pfam Name: AP2 Pfam Description: AP2 domain
  misc_feature: Public GI ID no. 84795238
  misc_feature: Bit score of 404.4 for HMM based on sequences of Figure 4
  misc_feature: Functional Homolog Of SEQ ID NO. 1
MAPRTSDKTATPPAAGAAATGLALGVGGGGNGGGVGPHYRGVRKRPWGRYAAEIRDPAKKSRVWLGTYDTAEEAARAYDAAAREYRGNKAKTNFPFASASAPPAAAALTGDGSRSSNSSTVESFGGDVQAPMQAMPLPPSLELDLFHRAATSTAGAGAGAGMRFPFSGYPVSHPYYFFGQAAAAAAGGCHMYSQAPKVTVASVSPSDSDSSSVVDLAPSPPSRKPVPFDLDLNCPPPAEL

SEQ ID NO: 35 - DNA, 778 bp, Musa acuminata
  misc_feature: Ceres Clone ID no. 1733772
  misc_feature: Encodes the peptide sequence at SEQ ID NO. 36
gagaaagtagagagagaagacggactccttgctgtggcgctacgagagaacccgatggccggcggcggtgggagagctggcggtggaggaagagcaggggggaaggagacccattaccgaggggtgaggaagcggccttgggggaggtacgctgcggagatacgggacccggggaagaagagccgggtctggctcgggacctttgacacggccgaggaggccgcgcgggcatacgatgccgccgcccggcagttccgtggatccaaggccaagaccaacttcccccacccggaggcgtacacgaggccgggcccggccggagtcgtcgcgatcgcgaccccggcggcgggtggcggcagccccagcagccagagcagcacggtggagtcctccagccgcgaggtgccgccactcgcgatccctctcccgccctcgctcgactttgatctcctccgccgccgcgtcgcgcggttcccattccagccctaccccgcggtcgccgccccagccatgccggcatcccgcccgtgctgcctcttcgacacgatcgtcggatccgagaaggcgtcggcggcggtgtccatgaaccgccgccgcttttgcccgtccatgatcatcgccgatatgcacgctccaacggccagcggcgttttgagcgattccgactcctactccgtcgccgacgtgcgcctcaaccaccgcttccgggggccgcacaagatgctgacgctcgatttagatctcaacctgccccctccacccgagatcgcctgatgtg

SEQ ID NO: 36 - protein, 239 aa, Musa acuminata
  misc_feature (19)..(70): Pfam Name: AP2 Pfam Description: AP2 domain
  misc_feature: Ceres Clone ID no. 1733772
  misc_feature: Bit score of 341.7 for HMM based on sequences of Figure 4
  misc_feature: Functional Homolog Of SEQ ID NO. 1
MAGGGGRAGGGGRAGGKETHYRGVRKRPWGRYAAEIRDPGKKSRVWLGTFDTAEEAARAYDAAARQFRGSKAKTNFPHPEAYTRPGPAGVVAIATPAAGGGSPSSQSSTVESSSREVPPLAIPLPPSLDFDLLRRRVARFPFQPYPAVAAPAMPASRPCCLFDTIVGSEKASAAVSMNRRRFCPSMIIADMHAPTASGVLSDSDSYSVADVRLNHRFRGPHKMLTLDLDLNLPPPPEIA

SEQ ID NO: 37 - protein, 220 aa, Vitis aestivalis
  misc_feature (20)..(71): Pfam Name: AP2 Pfam Description: AP2 domain
  misc_feature: Public GI ID no. 37625037
  misc_feature: Bit score of 513.7 for HMM based on sequences of Figure 4
  misc_feature: Functional Homolog Of SEQ ID NO. 1
MAPRDKPTGVTAGATGNKEIRYRGVRKRPWGRYAAEIRDPGKKSRVWLGTFDTAEEAARAYDAAAREFRGAKAKTNFPSPTDLAAAAATTANRSPSQSSTVESSSREALSPGAIAGPPALDLNLSHPAAAGQFSAVRYPAVGVFPIAQPLFFFEPFSRPEKPKTHRDMFDLDRAVADFHPAIAGSVHSDSDSSSVVDFNYHDRSTRLLNLDLNHPPAEVA

SEQ ID NO: 38 - protein, 249 aa, Vitis aestivalis
  misc_feature (19)..(70): Pfam Name: AP2 Pfam Description: AP2 domain
  misc_feature: Public GI ID no. 37625035
  misc_feature: Bit score of 392.3 for HMM based on sequences of Figure 4
  misc_feature: Functional Homolog Of SEQ ID NO. 1
MAPKEKVAGVKPSANAKEVHFRGVRKRPWGRYAAEIRDPGKKSRVWLGTFDTAEEAAKAYDSAAREFRGAKAKTNFPLVSENLNNNNQSPSQSSTVESSSREGFSPALMVDSSPLDLNLLHGGGVGVGVGVGVGAAAGYATAMRFPFQHHQFQVSSPSPAAGIVPTGGLPAANHLFYFDAMLRTGRVNQDFQRLRFDRAASDFRAALTGGVQSDSDSSSVVDLNHNDLKPRARVLIDLDLNRPPPPEIA

SEQ ID NO: 39 - protein, 249 aa, Vitis vinifera
  misc_feature (19)..(70): Pfam Name: AP2 Pfam Description: AP2 domain
  misc_feature: Public GI ID no. 147805535
  misc_feature: Bit score of 389.4 for HMM based on sequences of Figure 4
  misc_feature: Functional Homolog Of SEQ ID NO. 1
MAPKEKVAGVKPSANAKEVHFRGVRKRPWGRYAAEIRDPGKKSRVWLGTFDTAEEAAKAYDSAAREFRGAKAKTNFPLVSENLNNNNQSPSQSSTVESSSREGFSPALMVDSSPLDLNLLHGGGVGVGVGVGVGAAAGYATALRFPFQHHQFQVSSPSPAAGIVPTGGLPAANHLFYFDAMLRTGRVNQDFQRLRFDRAASDFRAALTGGVQSDSDSSSVVDLNHNDLKPRARVLIDLDLNRPPPPEIA

SEQ ID NO: 40 - protein, 227 aa, Vitis vinifera
  misc_feature (19)..(70): Pfam Name: AP2 Pfam Description: AP2 domain
  misc_feature: Public GI ID no. 157358724
  misc_feature: Bit score of 387.3 for HMM based on sequences of Figure 4
  misc_feature: Functional Homolog Of SEQ ID NO. 1
MAPKEKVAGVKPSANAKEVHFRGVRKRPWGRYAAEIRDPGKKSRVWLGTFDTAEEAAKAYDSAAREFRGAKAKTNFPLVSENLNNNNQSPSQSSTVESSSREGFSPALMVDSSPLDLNLLHGGGVGHHQFQVSSPSPAAGIVPTGGLPAANHLFYFDAMLRTGRVNQDFQRLRFDRAASDFRAALTGGVQSDSDSSSVVDLNHNDLKPRARVLIDLDLNRPPPPEIA

SEQ ID NO: 41 - protein, 238 aa, Stylosanthes hamata
  misc_feature (23)..(74): Pfam Name: AP2 Pfam Description: AP2 domain
  misc_feature: Public GI ID no. 4099914
  misc_feature: Bit score of 486.6 for HMM based on sequences of Figure 4
  misc_feature: Functional Homolog Of SEQ ID NO. 1
MAPREKTPAVKVNGKSNAGVKEVHFRGVRKRPWGRYAAEIRDPGKKSRVWLGTFDTAEDAARAYDAAAREFRGPKAKTNFPFPDSDDINNNNIVVVKNNNRSPSQSSTVESSSRDRDSYSAAAATAVADSSPLDLNLAPQELDSPDPFGSHSTQPFAVFPGGMPAAKQALYLDAVLRASMASHGQFGFGYNRPAAAGAQSDSDSSSVIDLNQNEGDVAKNNGRGLVLDLNEPPPQEMA

SEQ ID NO: 42 - DNA, 681 bp, Populus balsamifera subsp. trichocarpa
  misc_feature: Ceres Annot ID no. 1520029
  misc_feature: Encodes the peptide sequence at SEQ ID NO. 43
atggctcctagagaaagatctaacaacaacaacagcccgaacagccctagatcggagatccgttttagaggcgtcaggaagagaccatggggacgttatgcagctgagatcagagacccaggcaagaaaacgagggtttggctgggcacttttgatactgctgaagaggccgcccgtgcatacgatgcggctgctcgtgaattccgcggagccaaagccaaaactaatttccctacaatcggcgagcttaatcccaaccccacgcgcagtcctagccaaagcagcactgtcgagtcctcctccccaccgcccccacgcgccgcttctcctccaccaccactcgacctcactcttaacatttcccgccataaacccgaccgccagccttttcccaatggagttagttttccaggaggcgcgtggtttccattccctgctgttgcgcgtcccgttttcttcttcgacgcgtttgctcacgcgaagaatgatattcctaacaataatagtatagtgaataatattaacatgtgcaggtttgatcgaacggtgatggtgaatggaggtggggcccagagtgattcggattcatcatcagtcgtcgattacgatcatcgtcgtgatagtaagggattgtcacttgatcttgatcttaacctggccccaccaccggaagtctcgtga

SEQ ID NO: 43 - protein, 226 aa, Populus balsamifera subsp. trichocarpa
  misc_feature (20)..(71): Pfam Name: AP2 Pfam Description: AP2 domain
  misc_feature: Ceres Annot ID no. 1520029
  misc_feature: Bit score of 366.0 for HMM based on sequences of Figure 4
  misc_feature: Functional Homolog Of SEQ ID NO. 1
MAPRERSNNNNSPNSPRSEIRFRGVRKRPWGRYAAEIRDPGKKTRVWLGTFDTAEEAARAYDAAAREFRGAKAKTNFPTIGELNPNPTRSPSQSSTVESSSPPPPRAASPPPPLDLTLNISRHKPDRQPFPNGVSFPGGAWFPFPAVARPVFFFDAFAHAKNDIPNNNSIVNNINMCRFDRTVMVNGGGAQSDSDSSSVVDYDHRRDSKGLSLDLDLNLAPPPEVS

SEQ ID NO: 44 - DNA, 983 bp, Zea mays
  misc_feature: Ceres Clone ID no. 1065091
  misc_feature: Encodes the peptide sequence at SEQ ID NO. 45
aattatcacaccactctctccctctcctcctttatattttagttatggccaagattggtttgaaacccgatccagttaacaataatgccaaggagattcgttacagaggcgttaggaagaggccatggggccgttatgccgcggagatccgagatccgggtaagaaaacccgggtctggcttggtactttcgataccgccgaagaggcggcgcgtgcttacgatgcggcggcgcgtgatttccgaggggccaaggctaagaccaatttccccaattttctcgagctgagtgagaagatgccggctgccggcggcggtttcgagcgtagcccaagccagagcagcacccttgactgcgattctcctccggcggcggttacgccggcgagtgctgggattgttccgccgcagctcgagcttcgcctcggcggctatcagatcccgatggcgcgtcctatttactttttggacgttatgggagtaggcaacggaggtcgtgctcagcctccggtggcgtcagcttttaggtcgccggtggcttgtgtggctcagagcgactctgattcgtcgtcggttgttgatttcgaaggtgtgatggagaagagatctcagctgtttgatctagatctaaacttgtctcctccgtcggaacaggcctgaacttatcgaaggtggtcgtggtcgtgttcatttccgacgcgcatgcgttttttttttgtttgggagctgagagaattcgtattctcgttagttttttattctctctcactctagaataattattattatcggtttaaaaaaaaaaagtttatcgggagagagaatataattttagctgacatggatcgttatgtacatattattacataactggagatctgaacttttgttgtgtgcttttttgcgacttggtttcaccttgttgttcctctatctgtagcctttaattttgttattgcaaattttatatcaataatttggtga

SEQ ID NO: 45 - protein, 204 aa, Zea mays
  misc_feature (18)..(69): Pfam Name: AP2 Pfam Description: AP2 domain
  misc_feature: Ceres Clone ID no. 1065091
  misc_feature: Bit score of 263.9 for HMM based on sequences of Figure 4
  misc_feature: Functional Homolog Of SEQ ID NO. 1
MAKIGLKPDPVNNNAKEIRYRGVRKRPWGRYAAEIRDPGKKTRVWLGTFDTAEEAARAYDAAARDFRGAKAKTNFPNFLELSEKMPAAGGGFERSPSQSSTLDCDSPPAAVTPASAGIVPPQLELRLGGYQIPMARPIYFLDVMGVGNGGRAQPPVASAFRSPVACVAQSDSDSSSVVDFEGVMEKRSQLFDLDLNLSPPSEQA

SEQ ID NO: 46 - DNA, 1144 bp, Gossypium hirsutum
  misc_feature: Ceres Clone ID no. 1793792
  misc_feature: Encodes the peptide sequence at SEQ ID NO. 47
atctcaaccccacacataaatacccttttaccaaaggagaacattaaaacatagcccaactcttcgttttcttcaagcggaaaacagaaaactgaggctttcccttctcaaatggcaccgagggagaaaacggcggccgtcaagggtactgggaataataacgaggttcatttcagaggagtaaggaagcgtccatgggggcgttacgctgctgagatcagagatccagggaagaagagccgtgtttggctaggaacctttgatacggccgaggaagcagccagagcctacgacgccgccgctagggaatttcgcggcgccaaggccaagactaattttccggtcccttgtgagaatctcagcaaaggtaataactgtaaaagtaatggtaacaacaaccaccatagccctagccagagtagcaccgtggaatcctcgagccgtgagccggcgctcatggtagactcttcgcctttagatctcaacctcgtacaaggtgaggcggttactggttacgtgcctacggctgttagatttcctttccagcaagcttcaccggtgccatatattgcgggccgcaaagttttctactttgaaccgttcgttcggcctggtgcagtgaaaggacacccatttcaacggtttggattcgatcatcatgatcttcatgcgacgtttaatggtgtacaaagcgactctgactcatcatccgtcgttgatttgaaccaccacgaggtcaagtcgcgcccgcttctcaatatcgatctcaaccaacctgccgtgccggaaattgcctgatttattttttaatattcgcagatcgtcaaagcggaaaggcaaaaaagaaaaacgagttttttaaaatttcgttgtttaaacataactttcttagcagtcccgaggaaatatcgaaggtagattttagagaaaatgagaccccaaaaaaaaaaaaagagataaatttacggcaacagctgtgatattttgatgtgatctatcgtggcaatcgaatggcccagattatgtgtatagttagctcaagaactccttttttgcagcagataaacatcagttttgtctgttgttttaataactaattactgtaatttttccctcctatgaattaagcacaacaagtttcctt

SEQ ID NO: 47 - protein, 228 aa, Gossypium hirsutum
  misc_feature (19)..(70): Pfam Name: AP2 Pfam Description: AP2 domain
  misc_feature: Ceres Clone ID no. 1793792
  misc_feature: Bit score of 366.9 for HMM based on sequences of Figure 4
  misc_feature: Functional Homolog Of SEQ ID NO. 1
MAPREKTAAVKGTGNNNEVHFRGVRKRPWGRYAAEIRDPGKKSRVWLGTFDTAEEAARAYDAAAREFRGAKAKTNFPVPCENLSKGNNCKSNGNNNHHSPSQSSTVESSSREPALMVDSSPLDLNLVQGEAVTGYVPTAVRFPFQQASPVPYIAGRKVFYFEPFVRPGAVKGHPFQRFGFDHHDLHATFNGVQSDSDSSSVVDLNHHEVKSRPLLNIDLNQPAVPEIA

SEQ ID NO: 48 - DNA, 930 bp, Glycine max
  misc_feature: Ceres Clone ID no. 1619220
  misc_feature: Encodes the peptide sequence at SEQ ID NO. 49
gaagcctacatatacagcactactctctgatcagttttttcttggtctccgaatcacaaactcttcgaaaaaactaacattaatggctccgagggatatcaatagatctaacgttgttgttgccggaggatccaacccgacccgtaaagagatccgataccgcggcgtgaggaagcggccgtggggccgctacgccgccgagatccgcgatcccggcaagaagacgcgcgtctggctaggaacgttcgacaccgcggaggaggcggcgcgtgcgtacgatgcggcggcgcgtgagttccgcggcgcaaaggctaagaccaatttccccacccacgcggagctgacgcacgcggcggcgcgtagccccagccagagcagcacgttggattcgtcctctcccccgacgccgccgttggacctcactcttgccgccccactcgccgccggtggcgcgttggtgttcccagtggcgcggcccgtggtcttcttcgacgcgttcgagcgtgccgaggtgcgcgcgtcgttcgatcttcccgtggcggcgttcagcgactcggactcgtccacggtcatggattacgagcggggctcacgtcggagagtgttggatcttgaccttaatgtccctcctccgcccgaggttgcctgaaccggaaaaaagatccggttttttcgcagctcggtttttctctctctatctgagtgagtggcgattatcaatttatcgtagtagctgacacggtgctagagtttatgtaaatatattataaatagattacaattaaccaaaccaaaaagaaaaagcaggcttatgtttttttttctctattctgcttttttttttccttttcgcaaaggaagaaggaatttcttacctcactgttgcccggtgatgttaactttttatatatataatgccatttctatatc

SEQ ID NO: 49 - protein, 188 aa, Glycine max
  misc_feature (24)..(75): Pfam Name: AP2 Pfam Description: AP2 domain
  misc_feature: Ceres Clone ID no. 1619220
  misc_feature: Bit score of 283.9 for HMM based on sequences of Figure 4
  misc_feature: Functional Homolog Of SEQ ID NO. 1
MAPRDINRSNVVVAGGSNPTRKEIRYRGVRKRPWGRYAAEIRDPGKKTRVWLGTFDTAEEAARAYDAAAREFRGAKAKTNFPTHAELTHAAARSPSQSSTLDSSSPPTPPLDLTLAAPLAAGGALVFPVARPVVFFDAFERAEVRASFDLPVAAFSDSDSSTVMDYERGSRRRVLDLDLNVPPPPEVA

SEQ ID NO: 50 - protein, 227 aa, Nicotiana sylvestris
  misc_feature (25)..(76): Pfam Name: AP2 Pfam Description: AP2 domain
  misc_feature: Public GI ID no. 57012875
  misc_feature: Bit score of 505.6 for HMM based on sequences of Figure 4
  misc_feature: Functional Homolog Of SEQ ID NO. 1
MAVKNKVSNGDLKGGNVKTNGVKEVHYRGVRKRPWGRYAAEIRDPGKKSRVWLGTFDTAEEAAKAYDTAAREFRGPKAKTNFPLPSENQSTSHSSTMESSSGETGIHAPPHAPLELDLTRRLGSVAADGGDNCRRSGEVGYPIFHQQPTVAVLPNGQPVLLFDSLWRPGVVNRPQPYHVMPMAMGFNGVNAGVDPTVSDSSSVVEENQYDGKRGIDLDLNLAPPTEF

SEQ ID NO: 51 - protein, 211 aa, Vitis vinifera
  misc_feature (16)..(67): Pfam Name: AP2 Pfam Description: AP2 domain
  misc_feature: Public GI ID no. 147811787
  misc_feature: Bit score of 301.8 for HMM based on sequences of Figure 4
  misc_feature: Functional Homolog Of SEQ ID NO. 1
  misc_feature (55)..(55): Xaa is any aa, unknown, or other
MALKEKVKEGVKAKEPHFRGVRKRPWGRYAAEIRDPTKKSRVWLGTFDTAEEAAXAYDAAAREFRGSKAKTNFPLPNEVLPFPNTDNLTRSPSPSSTVESSSPHAPLELDLTRRLGSSDGGFPFHYQPHVVNSAAVAGVWPHARPVLFLDAFVGAEGFRVNPVTVAYDGGFGSPVQSESDSSSVVDSVQHESSGATRVLGLDLNFPPPLEA

SEQ ID NO: 52 - DNA, 1097 bp, Gossypium hirsutum
  misc_feature: Ceres Clone ID no. 1842925
  misc_feature: Encodes the peptide sequence at SEQ ID NO. 53
aacaaataccaacgacaatccccccaccattttttcctctctcaacaaaatttcatcactcttaaacggagcttcctaaatggcgccgagggagaaaacggcggacgtcaagggaaaagggaatgggtgtaataaagaggttcattttagaggagtaaggaagcgtccatggggtcgttacgccgctgagatcagagatccagggaagaaaagccgtgtttggcttggaacttttgatacagctgaggaagcggccaaggcctacgacgccgccgccagagaattccgcggcgccaaggcgaagactaatttccccctccctggtgaaattctcaacaatggtagtaactgtaacaacaatggcgataccaactgcaacaacaacaataacaaccacagccctagccggagtagcaccgtggagtcatcaagccacgagccgccgacactcgtcaagtgttcaccgttggatctcaatctcggacacgctgcggtcaccgggtacggatctcctgcggtcaggcttcctttccctcaaatttcgccggtcgccggttttttcgccaacggcgtctcggcagttgcagccccccaagttttttacttcgacgctttggtccgacccggtgttatgaaaggacagcagtatcaacaacggttgagattcgatcaccgtgattatcacgaaacttttaacgctggtgtacaaagcgactcagattcatcctccgtcgttgatttaaaccaccacgagatcaaacggcgaccgcttctcaatatcgatctcaaccaacctgctccggaagtcgcctgattatgattttttaaaatcgccgatatcaagaaccggaaaagaaaaacccacaaattttcaattttatctctttaaaatcgttaatcttctttttagtcccaattttgaaaattagacgagaaaattatacccaaaaagaaattacgcgagagcggcgtaaattgtgaatacgtagatgaaaaatctcctctttttcgcagcagagtaacgttagtttgttgtctgttgtttcatattaatttctgtaattattttaattttcaatgaattaattagtaattac

SEQ ID NO: 53 - protein, 244 aa, Gossypium hirsutum
  misc_feature (21)..(72): Pfam Name: AP2 Pfam Description: AP2 domain
  misc_feature: Ceres Clone ID no. 1842925
  misc_feature: Bit score of 347.0 for HMM based on sequences of Figure 4
  misc_feature: Functional Homolog Of SEQ ID NO. 1
MAPREKTADVKGKGNGCNKEVHFRGVRKRPWGRYAAEIRDPGKKSRVWLGTFDTAEEAAKAYDAAAREFRGAKAKTNFPLPGEILNNGSNCNNNGDTNCNNNNNNHSPSRSSTVESSSHEPPTLVKCSPLDLNLGHAAVTGYGSPAVRLPFPQISPVAGFFANGVSAVAAPQVFYFDALVRPGVMKGQQYQQRLRFDHRDYHETFNAGVQSDSDSSSVVDLNHHEIKRRPLLNIDLNQPAPEVA

SEQ ID NO: 54 - protein, 195 aa, Thellungiella halophila
  misc_feature (24)..(75): Pfam Name: AP2 Pfam Description: AP2 domain
  misc_feature: Public GI ID no. 20340233
  misc_feature: Bit score of 245.7 for HMM based on sequences of Figure 4
  misc_feature: Functional Homolog Of SEQ ID NO. 1
MTKMGFKPDSNPSPNPNESNAKEIRYRGVRKRPWGRYAAEIRDPGKKTRVWLGTFDTAQQAARAYDAAAREFRGAKAKTNFPTFLELNAAKDGGFARSPSQSSTVDSVSPTSARLVTPPQLELSLGGGGGGACYQIPVARRPVYFYNMTTFPAAAAATCGVQSESDSSSVVDFECGAEKKYRPLDLDLNLAPPAE

SEQ ID NO: 55 - DNA, 898 bp, Glycine max
  misc_feature: Ceres Clone ID no. 1657843
  misc_feature: Encodes the peptide sequence at SEQ ID NO. 56
attgtttccatttttcaagcctacatatacaacactactttcagttttttctgtctctgaatctcaaactcttcggaaagattaacattaatggctccaagggatatcaatagatccaacgttgttgttgttgccggagtatccaacccgacccataaagagatccgttaccgcggcgtgaggaagcggccgtggggccgctacgccgccgagatccgcgacccaggcaagaagacacgcgtgtggctaggaacgtttgacacggcggaggaggcggcgcgtgcgtatgacacggcggcgcgtgagttccgcggcacgaaggcgaagaccaatttccccacccacgcggcggcggcgcgtagtcccagccagagcagcacgctggactcctcgtctccgccgccgctggaccttactcttgccgccccactcaccgccgcgggcgcgttggttttcccggtggcgcgtcccgtggtgttcttcgacgcttttgcgcgtgccgaggtgcgcgcgtcgttcgatcttcccgtggcggggttcagcgactcggactcgtcctcggtcgtggactacgagcgggtcccacatcggaaagtgttggatcttgaccttaatgtccctcctccgcccgaggttgcctgaaccggcaaaagatccggttttaacgcggctcggtttttttctctctatctgagaatgatgattatcaagttatcattgtagttgacatggtgctagagtttatgtacatagattataattaaccaaacaaaaaaaaaaaagcaggcttatgttttttctctattctgcttttttattttctcaatggaagaagggatttcttacctcattattgccgttgatgttaacttttatatatataaaatagcatttatat

SEQ ID NO: 56 - protein, 183 aa, Glycine max
  misc_feature (25)..(76): Pfam Name: AP2 Pfam Description: AP2 domain
  misc_feature: Ceres Clone ID no. 1657843
  misc_feature: Bit score of 273.8 for HMM based on sequences of Figure 4
  misc_feature: Functional Homolog Of SEQ ID NO. 1
MAPRDINRSNVVVVAGVSNPTHKEIRYRGVRKRPWGRYAAEIRDPGKKTRVWLGTFDTAEEAARAYDTAAREFRGTKAKTNFPTHAAAARSPSQSSTLDSSSPPPLDLTLAAPLTAAGALVFPVARPVVFFDAFARAEVRASFDLPVAGFSDSDSSSVVDYERVPHRKVLDLDLNVPPPPEVA

SEQ ID NO: 57 - DNA, 633 bp, Populus balsamifera subsp. trichocarpa
  misc_feature: Ceres Annot ID no. 1455887
  misc_feature: Encodes the peptide sequence at SEQ ID NO. 58
atggcacccaagaagcttaatggtaatgacaatggttctttgaagaaagcaagtggtgatcatgacaagaaggaaatccattataggggagtgaggaagaggccatgggggaggtatgctgctgagataagggatcccgggaagaaaagccgggtttggttgggcacgtttgacacggcagtggaggctgcgagggcctatgataaggcggcgcgtgagtatcgtggtgctaaggcgaagaccaactttccaatagcggagaaggtggttgattatgacgatgagaagcagagctctagccagagcagcaccgttgagtcgtcaagctccccggtggtttctgcggtggcgcgtgatgtaactcgccaggttggtggggttgtggggatggggaggtttccctttgtgttccagcagcagccgccgcatgttaacgctgttggtcctgtctggtttcttgatagtactgttaagcctgagtttgtggctcagcgtttccctgtccggtatgacccggtgggtcttgagggcggggcccatagtgactcggattcatcatctgtgattgattttaagccaaggagttcaattcttcatcttgatcttaacctgcctccaccagctgatgcttga

SEQ ID NO: 58 - protein, 210 aa, Populus balsamifera subsp. trichocarpa
  misc_feature (26)..(77): Pfam Name: AP2 Pfam Description: AP2 domain
  misc_feature: Ceres Annot ID no. 1455887
  misc_feature: Bit score of 253.2 for HMM based on sequences of Figure 4
  misc_feature: Functional Homolog Of SEQ ID NO. 1
MAPKKLNGNDNGSLKKASGDHDKKEIHYRGVRKRPWGRYAAEIRDPGKKSRVWLGTFDTAVEAARAYDKAAREYRGAKAKTNFPIAEKVVDYDDEKQSSSQSSTVESSSSPVVSAVARDVTRQVGGVVGMGRFPFVFQQQPPHVNAVGPVWFLDSTVKPEFVAQRFPVRYDPVGLEGGAHSDSDSSSVIDFKPRSSILHLDLNLPPPADA

SEQ ID NO: 59 - protein, 223 aa, Solanum tuberosum
  misc_feature (28)..(79): Pfam Name: AP2 Pfam Description: AP2 domain
  misc_feature: Public GI ID no. 118490009
  misc_feature: Bit score of 281.5 for HMM based on sequences of Figure 4
  misc_feature: Functional Homolog Of SEQ ID NO. 1
MAPKEKIGAVTAAAVMAVGKLNGISKEVHYRGVRKRPWGRYAAEIRDPGKKSRVWLGTFDTAEEAAKAYDNAAREFRGAKAKTNFPQLLKEEDLKFPVKNEINRSPSQTSTVESSSPVMVDSSSPLDLRLCGSIGGFNHNTVRFPISGGGFTGAVPAVNHMYYLDALERAGVINLETNRKKTVDFLGGGDSDTSTVIDFMRVDVKPTIAGLNLDLNFPPPENM

SEQ ID NO: 60 - DNA, 908 bp, Brassica napus
  misc_feature: Ceres Clone ID no. 1381515
  misc_feature: Encodes the peptide sequence at SEQ ID NO. 61
accttcaattatcacaccgtcccctctctccctctccggttattacgttatggccaagatgggtttgaaacccgacccggttactcctaacccgacccacaataatgccaaggagattcgttacagaggcgtgaggaagcgtccttggggccgttacgccgccgagatccgagatccgggtaagaaaacccgcgtctggcttggcaccttcgataccgcagaggaggcggcgcgtgcttacgataaggcggcgcgtgatttccgtggcgctaaggcgaagacgaattttcttgagctgaatgagaaggtgctctccggtggaggcggtttcgcgcggagccctagccagagcagcacccttgactacgcttctcctccggcggtgactgatgggattgttccacctcaacttgagctaagtcttggcggcggcggtggcgcgtgttaccagatcccaatggcgcgtcctctctactttttggaccttatgggggtcggaaacggaggtcgtggtcagcttccggtgtcgccggtgatgcatgtctctacgaagatggcttgtggtgcccagagcgactctgattcttcatcggtcgttgatttcgaaagtgggatggagaagagatctcagccgttagatttagatctaaacttgcttcctccggtggaacaggcctgaggtgttgccggtttcgcgcatgcgttttttgctttgcagctgagagaataatttcacgtagtttttttctccatcactctaaaataattattatcggtttttagaaattatataaatcgagggagaaaaagtataattcttagatgacatgtatcgttatgtacataaccggagatctgaacttttgttgtgtgcttttttgcgacttggttttcaccatgttgtttct

SEQ ID NO: 61 - protein, 209 aa, Brassica napus
  misc_feature (23)..(74): Pfam Name: AP2 Pfam Description: AP2 domain
  misc_feature: Ceres Clone ID no. 1381515
  misc_feature: Bit score of 239.1 for HMM based on sequences of Figure 4
  misc_feature: Functional Homolog Of SEQ ID NO. 1
MAKMGLKPDPVTPNPTHNNAKEIRYRGVRKRPWGRYAAEIRDPGKKTRVWLGTFDTAEEAARAYDKAARDFRGAKAKTNFLELNEKVLSGGGGFARSPSQSSTLDYASPPAVTDGIVPPQLELSLGGGGGACYQIPMARPLYFLDLMGVGNGGRGQLPVSPVMHVSTKMACGAQSDSDSSSVVDFESGMEKRSQPLDLDLNLLPPVEQA

SEQ ID NO: 62 - DNA, 845 bp, Arabidopsis thaliana
  misc_feature: Ceres Clone ID no. 22775
  misc_feature: Encodes the peptide sequence at SEQ ID NO. 63
ttcaattatctatcacaccaccactctctctctaatctatctatccgagaatggccaagatgggcttgaaacccgacccggctactactaaccagacccacaataatgccaaggagattcgttacagaggcgttaggaagcgtccttggggccgttatgccgccgagatccgagatccgggcaagaaaacccgcgtctggcttggcactttcgatacggctgaagaggcggcgcgtgcttacgatacggcggcgcgtgattttcgtggtgctaaggctaagaccaatttcccaacttttctcgagctgagtgaccagaaggtccctaccggtttcgcgcgtagccctagccagagcagcacgctcgactgtgcttctcctccgacgttagttgtgccttcagcgacggctgggaatgttcccccgcagctcgagcttagtctcggcggaggaggcggcggctcgtgttatcagatcccgatgtcgcgtcctgtctactttttggacctgatggggatcggtaacgtaggtcgtggtcagcctcctcctgtgacatcggcgtttagatcgccggtggtgcatgttgcgacgaagatggcttgtggtgcccaaagcgactctgattcgtcatcggtcgttgatttcgaaggtgggatggagaagagatctcagctgttagatctagatcttaatttgcctcctccatcggaacaggcctgagcttttaacggtgtcgtttcaattcgaagcgcatgcgtttcttcttctttttgagctgtgaaaattcgttttctcatagtttttcctctctctctctctcagtctaaatttattaccagtttttag

SEQ ID NO: 63 - protein, 222 aa, Arabidopsis thaliana
  misc_feature (23)..(74): Pfam Name: AP2 Pfam Description: AP2 domain
  misc_feature: Ceres Clone ID no. 22775
  misc_feature: Bit score of 275.2 for HMM based on sequences of Figure 4
  misc_feature: Functional Homolog Of SEQ ID NO. 1
MAKMGLKPDPATTNQTHNNAKEIRYRGVRKRPWGRYAAEIRDPGKKTRVWLGTFDTAEEAARAYDTAARDFRGAKAKTNFPTFLELSDQKVPTGFARSPSQSSTLDCASPPTLVVPSATAGNVPPQLELSLGGGGGGSCYQIPMSRPVYFLDLMGIGNVGRGQPPPVTSAFRSPVVHVATKMACGAQSDSDSSSVVDFEGGMEKRSQLLDLDLNLPPPSEQA

SEQ ID NO: 64 - protein, 211 aa, Capsicum annuum
  misc_feature (23)..(74): Pfam Name: AP2 Pfam Description: AP2 domain
  misc_feature: Public GI ID no. 60459377
  misc_feature: Bit score of 375.5 for HMM based on sequences of Figure 4
  misc_feature: Functional Homolog Of SEQ ID NO. 1
MALKSKVSSNGSENAKVNGVKEVHYRGVRKRPWGRYAAEIRDPGKKSRVWLGTFDTAEEAAKAYDAAARDFRGPKAKTNFPSPFPLETLNQSPSNSSTLESSSGETGVHAPMEVDLTRRLGAVAPVFHQQPTVAVLPNGQPVLLFDSLWRPGVVVDKAQLSYQVAPMAIEFTGAAGGVSSVSDSSSVVEENQYVGKKGLDLDLNLAPPMEI

SEQ ID NO: 65 - DNA, 648 bp, Populus balsamifera subsp. trichocarpa
  misc_feature: Ceres Annot ID no. 1488231
  misc_feature: Encodes the peptide sequence at SEQ ID NO. 66
atggcacccaagaagcttaatgccagcaacagtggctgtttcaagaaagcaagtggggatcatgacaagaaagagatacattacaggggagtgaggaagaggccgtgggggaggtatgctgctgagataagggatcccgggaagaaaagccgggtttggctgggtacttttgatacggcggaggaggctgctaaagcctatgataaagcggcgcgtgagtatcggggtgctaaggcgaagaccaactttcctttttccggggaggtggttaattatgacgatgacaagcagagttctagccatagcagcaccgtggagtcgtcgagctctccggttgtttctgctgcggtgacccgccaggttggtggtggtggagtgggcggggttgtggggatgggagggtttccttttgtgtaccagcagcagcagcagcagcagaatgttaacgttgttgctcctgtctggttttttgatagtgtgaggcctgagtttgtgactcagcgattccctgtccggtttgaccaggtgggtcttgagagtgctggtggggcccagagtgactcggattcatcatctatggttgattgtcagccacggagatcagttcttgatcttgatcttaacctgcctccaccgctggatgcttga

SEQ ID NO: 66 - protein, 215 aa, Populus balsamifera subsp. trichocarpa
  misc_feature (26)..(77): Pfam Name: AP2 Pfam Description: AP2 domain
  misc_feature: Ceres Annot ID no. 1488231
  misc_feature: Bit score of 250.5 for HMM based on sequences of Figure 4
  misc_feature: Functional Homolog Of SEQ ID NO. 1
MAPKKLNASNSGCFKKASGDHDKKEIHYRGVRKRPWGRYAAEIRDPGKKSRVWLGTFDTAEEAAKAYDKAAREYRGAKAKTNFPFSGEVVNYDDDKQSSSHSSTVESSSSPVVSAAVTRQVGGGGVGGVVGMGGFPFVYQQQQQQQNVNVVAPVWFFDSVRPEFVTQRFPVRFDQVGLESAGGAQSDSDSSSMVDCQPRRSVLDLDLNLPPPLDA

SEQ ID NO: 67 - DNA, 1024 bp, Gossypium hirsutum
  misc_feature: Ceres Clone ID no. 1884969
  misc_feature: Encodes the peptide sequence at SEQ ID NO. 68
aaaccaaaatatttacaaccctgagagagaaaaaaagggaaagaaaagtttttatggctccccaagacaaaaatgcgagcaaaatcttgaagaaagctaacgttactggaagtacgagcagccaagaggtgcatttcaggggagtaaggaagaggccatggggtaggtacgctgccgaaatcagagatcccggaaagaaaagccgtgtttggcttggtactttcgatacggctgaggaagctgccagagcctacgacgcggcggcgcgtgagtttcgtggacctaaggctaagaccaacttccctttaccggatgaaaccaactgttacaagggccagaaccagcagagccctagccaaagcagcacggtagaggaatctggaagcccaacggtggagcgtggagtcaacactgtgaccggggcagtagggagattccctttcgcgtgccaccagcagctggctctgggtggtggagtcgctaatggtgggattagcggggtgacccagtcgcggccggttctatttatcgaagcgttgggaggagctggcgttgttggtcaggtttatccggttcggttcgatccggtgggagtgcagttgggtatgggatttgcaagtgttgtccgaagtgaaccggactcttcatcggccattcattgcaaggcaaggagacctggccttgtcctcgatcttaaccttcctcctccagtcgatgcttgatgttttgcattttttttttctttttttcttttttttttacgggaaacgccctttcatcatcttaatttaagacatctgagaggtaggaagctatgataaacaagaggtgatagtaatccgtattttgtatcattttagacatgattttatccttaaatcctatgtaaatagttttacgatagtaatccgtgtttgcaaactgagaggaaaactatgatccattatcttagatgattttgtttataacctctcgttcaaaattaaccattcttttttactttcaatgagaatctttcttattt

SEQ ID NO: 68 - protein, 222 aa, Gossypium hirsutum
  misc_feature (26)..(77): Pfam Name: AP2 Pfam Description: AP2 domain
  misc_feature: Ceres Clone ID no. 1884969
  misc_feature: Bit score of 260.6 for HMM based on sequences of Figure 4
  misc_feature: Functional Homolog Of SEQ ID NO. 1
MAPQDKNASKILKKANVTGSTSSQEVHFRGVRKRPWGRYAAEIRDPGKKSRVWLGTFDTAEEAARAYDAAAREFRGPKAKTNFPLPDETNCYKGQNQQSPSQSSTVEESGSPTVERGVNTVTGAVGRFPFACHQQLALGGGVANGGISGVTQSRPVLFIEALGGAGVVGQVYPVRFDPVGVQLGMGFASVVRSEPDSSSAIHCKARRPGLVLDLNLPPPVDA

SEQ ID NO: 69 - DNA, 961 bp, Panicum virgatum
  misc_feature: Ceres Clone ID no. 1802100
  misc_feature: Encodes the peptide sequence at SEQ ID NO. 70
aatccatcctctcctcgcgagctccaacagcaatcaagctagagagaagcttaggctgcaagaagaagccagcaagaggcgaggacgcgagcagggcaagcgagatcactcggaccaagcgatccatggcgccgaggaggtcgacttcgccggccgggagcggcagcagcggcggcggcggcggcgcggagcagccgaggctgcgcggcgtgcggaagcggccgtggggccggtacgcggcggagatccgcgaccccgtgcggaaggcgcgcgtgtggctggggaccttcgacacgcccgaggaggcggcgcgcgcctacgacgccgccgcgcgcaggctccgcgggccgcgcgcagccaccaactaccccgcccacgcccaggacccgaaggcggcggccgcggcgattccggcgtcgagcgctagcgcgagcgggagcggggtgctgtcgtcggaggacgcgtcgtcgtcgtcctcctgccgggactcgccgctggcgcccccgtcgctggacctgagcctggcgctcccggccgtggcggccgcgccgccgccgtattcgtaccagcagctgttcctggacccggcggcgatggtggccgcggcgccggcgctgctgcagttcctgccgcccaagagtgaggaagaacagagctgctcagggtcgagctcctcctcgtcggtggtggtcgacgcggcgccggcggtgggcctggggctggacctgaacctggcgctcgcggccgggatggtgatgtagagacaagaccaatgatttggttaattagtggctcctagctcaccgatccagatgttcacccggtgtaaatagtcggcccgcagggatttatttgtgcatctgcgcagccagttctctttgcttcctttttgtacccacagatttcgcgtcccgcaaagatgcgcgccaacgcaagaaggaagaaactttgccccagccac

SEQ ID NO: 70 - protein, 211 aa, Panicum virgatum
  misc_feature (24)..(75): Pfam Name: AP2 Pfam Description: AP2 domain
  misc_feature: Ceres Clone ID no. 1802100
  misc_feature: Bit score of 122.3 for HMM based on sequences of Figure 4
  misc_feature: Functional Homolog Of SEQ ID NO. 1
MAPRRSTSPAGSGSSGGGGGAEQPRLRGVRKRPWGRYAAEIRDPVRKARVWLGTFDTPEEAARAYDAAARRLRGPRAATNYPAHAQDPKAAAAAIPASSASASGSGVLSSEDASSSSSCRDSPLAPPSLDLSLALPAVAAAPPPYSYQQLFLDPAAMVAAAPALLQFLPPKSEEEQSCSGSSSSSSVVVDAAPAVGLGLDLNLALAAGMVM

SEQ ID NO: 71 - protein, 222 aa, Gossypium barbadense
  misc_feature (26)..(77): Pfam Name: AP2 Pfam Description: AP2 domain
  misc_feature: Public GI ID no. 156145802
  misc_feature: Bit score of 261.7 for HMM based on sequences of Figure 4
  misc_feature: Functional Homolog Of SEQ ID NO. 1
MAPQDKNASKTLKKANGTGSTSSQEVHFRGVRKRPWGRYAAEIRDPGKKSRVWLGTFDTAEEAAKAYDAAAREFRGPKAKTNFPLPDETNCYKGQNQQSPSQSSTVEESGSPTVERGVNTLSGAVGRFPFACHQQLALGGGVANGGISGVTRSRPVLFFEALGGAGVVGQVYPVRFDPVGVQLGMGFASVVRSEPDSSSAIHCKARRPGLALDLNLPPPVDA

SEQ ID NO: 72 - protein, 222 aa, Solanum lycopersicum
  misc_feature (25)..(76): Pfam Name: AP2 Pfam Description: AP2 domain
  misc_feature: Public GI ID no. 28274832
  misc_feature: Bit score of 272.3 for HMM based on sequences of Figure 4
  misc_feature: Functional Homolog Of SEQ ID NO. 1
MAPKEKIGAVTAMAMVNLNGISKEVHYRGVRKRPWGRYAAEIRDPGKKSRVWLGTFDTAEEAARAYDNAAREFRGAKAKTNFPKLEMEKEEDLKFAVKNEINRSPGQTSTVESSSPVMVDSSSPLDLSLCGSIGGFNHHTVKFPSSGGGFTGSVQAVNRMYYIEALARAGVIKLEQIGRKRLDYLGGGDSDSSTVIDFMRVDVKSTTAGLNLDLNFPPPENM

SEQ ID NO: 73 - DNA, 1126 bp, Triticum aestivum
  misc_feature: Ceres Clone ID no. 568399
  misc_feature: Encodes the peptide sequence at SEQ ID NO. 74
ccccccagctccaaccagccagaccatccaaccaacgccgcaccgcaacaacaaccgccgcgcacgcgccgagcacggtcgaacacttgccatggctcccaagaacgcgctccccgtcgccgtcgccgccgccgcggacgccggcatggagcccaggttccgcggcgtgcgcaagcggccgtggggcaggtacgcggcggagatccgcgacccggccaggaaggcccgcgtctggctcggcaccttcgacaccgccgaggccgcggcccgcgcctacgacgccgccgcgctccactaccgcgggcccaaggccaagaccaacttccccgtcggcaccgtcgccgccttcgcccacgtcccgctcccgccgcccaaggcgctggccgtcagccccagcagcagcaccgtcgagtcttcgtcccgggacacgccggccgcggcgcccgccgctcctgctgctgctgcccccgcgcccccgccggcgctcgacctgagcctggcgatgccggccatggtggcggcgcagccgttcctgttcctggaccccagggtcgcggtgaccgtggccgtggccgcgccggcgccggccccctgccggtcagcggcgatcagcggcatgaacaaggtggcgtcccgcgaggaagagcagagcgacaccgggtcgtcgtcatccgtggtggacgcctcgccggccgtgggcgtggggttcgacctgaacctgccgccgccggtggagatggcgtaggagatggaccgatctcggtcgcccgatgacgacgcggcccggaagtaaagcaaagcgctctcgtggtagaatttaaagtttagaagaatggcgtgtacttactagtaagaggttaatcggccgtttaattgccaggatcgatccatcgatgggtaagggtaagtaggtgtacatagatcgcgtgcgtgcgttttttgcatggggaggcaggtaggatgaaacacatccatctatctgctcccaatgttacttacaatttccttaaaagcaagggaaaaaaagacaaaaaggaagaagccagtagtagagcattttgttcttcagtgtacaatatttgatctctgtctctcggattaatgtgaaatttatgatttccattcc

SEQ ID NO: 74 - protein, 217 aa, Triticum aestivum
  misc_feature (21)..(72): Pfam Name: AP2 Pfam Description: AP2 domain
  misc_feature: Ceres Clone ID no. 568399
  misc_feature: Bit score of 188.5 for HMM based on sequences of Figure 4
  misc_feature: Functional Homolog Of SEQ ID NO. 1
MAPKNALPVAVAAAADAGMEPRFRGVRKRPWGRYAAEIRDPARKARVWLGTFDTAEAAARAYDAAALHYRGPKAKTNFPVGTVAAFAHVPLPPPKALAVSPSSSTVESSSRDTPAAAPAAPAAAAPAPPPALDLSLAMPAMVAAQPFLFLDPRVAVTVAVAAPAPAPCRSAAISGMNKVASREEEQSDTGSSSSVVDASPAVGVGFDLNLPPPVEMA

SEQ ID NO: 75 - protein, 222 aa, Oryza sativa subsp. japonica
  misc_feature (24)..(75): Pfam Name: AP2 Pfam Description: AP2 domain
  misc_feature: Public GI ID no. 115460458
  misc_feature: Bit score of 183.4 for HMM based on sequences of Figure 4
  misc_feature: Functional Homolog Of SEQ ID NO. 1
MAPRNAAEAVAVAVAEGGGAGMEPRFRGVRKRPWGRYAAEIRDPARKARVWLGTFDTAEAAARAYDSAALHFRGPKAKTNFPVAFAHAHHHAPPPPLPKAAALAVVSPTSSTVESSSRDTPAAAPVAAAAKAQVPASPSLDLSLGMSAMVAAQPFLFLDPRVAVTVAVAAPVPRRPAVVSVKKEVARLDEQSDTGSSSSVVDASPAVGVGLDLNLPPPIEEA

SEQ ID NO: 76 - DNA, 561 bp, Arabidopsis thaliana
  misc_feature: Ceres Clone ID no. 4831
  misc_feature: Encodes the peptide sequence at SEQ ID NO. 77
gctctagtttcccccaacaatcgccatggcagcttcgtctctcaatctcctcctcattctctctcttctcactttcatttctctccagagatctgaatctctttccgataatccatctctcactcttctacccgacggattcgactggccgatctctcactccgatgaattcgatatcatcgacggtgaagaaagcttcgaagttacggaggaagacgacggcgtaacagatcgacggtcattgtactggcggaggacgaagtattacatatcgtacggtgcattgtcggcgaatagagtgccatgtcctcccagatctggaagatcgtactacactcataactgcttcagagctagaggtcccgttcatccgtatagcctaggctgctcgtcgatcactcccggagatagatgaagaaagcttaaaactccatgggcattttcgtaattttgccaaccatggtttattattatgatgtttgtatttgtaatgttcgatgtttgtttgtaaaccgtgattagttacgttcgttaaacggtaaacccgatgattataatttc

SEQ ID NO: 77 - protein, 129 aa, Arabidopsis thaliana
  misc_feature (57)..(129): Pfam Name: RALF Pfam Description: Rapid ALkalinization Factor (RALF)
  misc_feature: Ceres Clone ID no. 4831
  misc_feature: Bit score of 330.2 for HMM based on sequences of Figure 9
MAASSLNLLLILSLLTFISLQRSESLSDNPSLTLLPDGFDWPISHSDEFDIIDGEESFEVTEEDDGVTDRRSLYWRRTKYYISYGALSANRVPCPPRSGRSYYTHNCFRARGPVHPYSLGCSSITPGDR

SEQ ID NO: 78 - DNA, 666 bp, Brassica napus
  misc_feature: Ceres Clone ID no. 1387948
  misc_feature: Encodes the peptide sequence at SEQ ID NO. 79
gcatgtgagttgctaattactactctcttcttctattattaactttcttcctcttcttcttcttcgcttccctctccagcatcgccatggcagctgctccgcctcttactctcctcatcgctctctctcttctcttcatttcactccagagatctgaatctctccccgagaatccatccatgattcttctaggcgacggattcgactggccgatctctcacggcgacgcattagacatcgacggaggagaaagctttgaagatgcggaggaggaagatgtcgcggatcgacggtcattgtactggaagaggaggagatactacatctcttacggcgcattgtcggcgaacagagtcccgtgtcctcccagatctggaagatcgtactacactcacaactgcttcagagctagaggtcaggtgcatccctacagtcgaggctgctcctccatcactcggtgccggagatagaagaaaccacgggggcattctcgtaattttccaatcacggactctgtttgtagttctcgttcgatttcgatgtgttgtgtagtaaaccgtgattagttacgtttgtttaaattaattaagcccgcggtattattattattcgagtgatatctatatgtattcaactttgtggtaattgttatttattttgtcggtg

SEQ ID NO: 79 - protein, 127 aa, Brassica napus
  misc_feature (55)..(127): Pfam Name: RALF Pfam Description: Rapid ALkalinization Factor (RALF)
  misc_feature: Ceres Clone ID no. 1387948
  misc_feature: Bit score of 307.4 for HMM based on sequences of Figure 9
  misc_feature: Functional Homolog Of SEQ ID NO. 77
MAAAPPLTLLIALSLLFISLQRSESLPENPSMILLGDGFDWPISHGDALDIDGGESFEDAEEEDVADRRSLYWKRRRYYISYGALSANRVPCPPRSGRSYYTHNCFRARGQVHPYSRGCSSITRCRR

SEQ ID NO: 80 - DNA, 898 bp, Gossypium hirsutum
  misc_feature: Ceres Clone ID no. 1937714
  misc_feature: Encodes the peptide sequence at SEQ ID NO. 81
ccttcacctctgcaacttgttagctgtttaccaacaatggcttcttcttcggttctcagcaagcttcttttgccccttttcctcactcacattgccgtctcgatctcgaaaaccgaagctcaagttgaagacacaaggttgaagctggtgagagatgctttcgaatggccactttcaatgtcgtttcagggtgacttacacgacaatgaagaaggcgatgaggaggtagatgatgaagttgaaaatgggtatagtggtagatctttgttgtggtggaagagaatgaggtattacatttcgtatggggcgctttcggctaacagaatcccatgtccaccaaggtcaggcaggtcttattatactcacaactgtttcaaggctcatggccctgttcatccttataccaggggatgttccaggatcactcgctgcaggagatgaggttttaaatttagccctttttagaatctgggtttgtattagttaatcattattttgcgaaatgtggaagatttgagtgttttgggatttggggcttctttttgcccttcgtttagtatttgaagagcatcatgtgtcataaggttaaactactttatgattatggtagtttttattatatgtatagttttggtctggaagggcgggggtgttcattggcagtcgctattttatatcatatatgtgatctcatcaacttacctgtaaatgcttgaagacctgaatcctgctgttgcgtgctgcaacaaacgccgcagcttgaaaaggtgaactagtcaccaaaattttccgccttaattttaaataattattaaataattcgataatttttattatttaaaatcgttgttatatatttttctttgtcaccatttgtattaatcaaaagtttttaccc

SEQ ID NO: 81 - protein, 134 aa, Gossypium hirsutum
  misc_feature (58)..(134): Pfam Name: RALF Pfam Description: Rapid ALkalinization Factor (RALF)
  misc_feature: Ceres Clone ID no. 1937714
  misc_feature: Bit score of 363.8 for HMM based on sequences of Figure 9
  misc_feature: Functional Homolog Of SEQ ID NO. 77
MASSSVLSKLLLPLFLTHIAVSISKTEAQVEDTRLKLVRDAFEWPLSMSFQGDLHDNEEGDEEVDDEVENGYSGRSLLWWKRMRYYISYGALSANRIPCPPRSGRSYYTHNCFKAHGPVHPYTRGCSRITRCRR

SEQ ID NO: 82 - protein, 125 aa, Vitis vinifera
  misc_feature (53)..(125): Pfam Name: RALF Pfam Description: Rapid ALkalinization Factor (RALF)
  misc_feature: Public GI ID no. 157345132
  misc_feature: Bit score of 344.6 for HMM based on sequences of Figure 9
  misc_feature: Functional Homolog Of SEQ ID NO. 77
MACSSLPKLLVLCAFFVYISNVVVVAQVDESSLKLITDSLEWPSTMSLYNEFGDEDGEDPDGVIDRRSMFWHRMRYYISYGALSANRIPCPPRSGRSYYTHNCFQARGPVRPYTRGCSTITRCRR

SEQ ID NO: 83 - DNA, 696 bp, Glycine max
  misc_feature: Ceres Clone ID no. 464828
  misc_feature: Encodes the peptide sequence at SEQ ID NO. 84
gatggcttctcttctcaccctcgctctgttactcttctgcattgcctttacctcccacgttgccgtgcaggcgcacatggaggacacggccttcaacctcatgtcggacgccttggagtggcccaccacaatgtcgctctacgacgaagacgacgcccaagaggatgtcgagaacgcttacagtcggagatcgttgttctggcggcggatgaagtactacatctcctacggtgctctttctgctaaccgaattccttgcccgcctcgttctggtagatcttactacacccacaactgctacagggcacgaggccccgttcacccttactccagaggatgctctgccatcacgcgctgccggagatgagtttgatgtgagttccgatctgatcacacgcttcagatcggagatggaaataaaaaaaccgagtaccgtttatggtggttttgttttgttttgttttattggtgtactagatttatattgtggatttaaggcgtcgttagttgtgctaagcaagtcaagtcaagtgaaagtgtcgtgtttgagttaacggtttttggggattcttcacttgcatcgactcgttgcgctgcgcaaatgaatctgcttgctttttgtgttacttcgtcatttattcgtttgtataaacccaacggtttctttttcttggtgttcagagcactttcagtttc

SEQ ID NO: 84 - protein, 121 aa, Glycine max
  misc_feature (49)..(121): Pfam Name: RALF Pfam Description: Rapid ALkalinization Factor (RALF)
  misc_feature: Ceres Clone ID no. 464828
  misc_feature: Bit score of 319.9 for HMM based on sequences of Figure 9
  misc_feature: Functional Homolog Of SEQ ID NO. 77
MASLLTLALLLFCIAFTSHVAVQAHMEDTAFNLMSDALEWPTTMSLYDEDDAQEDVENAYSRRSLFWRRMKYYISYGALSANRIPCPPRSGRSYYTHNCYRARGPVHPYSRGCSAITRCRR

SEQ ID NO: 85 - DNA, 405 bp, Populus balsamifera subsp. trichocarpa
  misc_feature: Ceres Annot ID no. 1451368
  misc_feature: Encodes the peptide sequence at SEQ ID NO. 86
atggcagcttctacattgcaataccatttcgccttcttcatcttctttctcgtaattgcttctttcagtccaagaatccaagctcaagttgatgaaacaagcttgaaggcaatgagagatgcactagaatggccaatgtccatgtattatgatgaaagcagcggtctcaatgatgggttagtgggttttgacgatggagttgttgacgatgaagaaagtagtcgtagatctttgttttggaggagaacgcattattatatctcgtatggagctttgtctgctaatagaattccttgtccagcgaggtccgggcgatcctactacagccacaattgcttcgcgtctagagctccagtgaatccctattccagagggtgttctaggatcgctcgttgcaggagatga

SEQ ID NO: 86 - protein, 134 aa, Populus balsamifera subsp. trichocarpa
  misc_feature (62)..(134): Pfam Name: RALF Pfam Description: Rapid ALkalinization Factor (RALF)
  misc_feature: Ceres Annot ID no. 1451368
  misc_feature: Bit score of 340.5 for HMM based on sequences of Figure 9
  misc_feature: Functional Homolog Of SEQ ID NO. 77
MAASTLQYHFAFFIFFLVIASFSPRIQAQVDETSLKAMRDALEWPMSMYYDESSGLNDGLVGFDDGVVDDEESSRRSLFWRRTHYYISYGALSANRIPCPARSGRSYYSHNCFASRAPVNPYSRGCSRIARCRR

SEQ ID NO: 87 - protein, 123 aa, Solanum chacoense
  misc_feature (52)..(123): Pfam Name: RALF Pfam Description: Rapid ALkalinization Factor (RALF)
  misc_feature: Public GI ID no. 37695575
  misc_feature: Bit score of 304.5 for HMM based on sequences of Figure 9
  misc_feature: Functional Homolog Of SEQ ID NO. 77
MESPILFFLIIFLFTITNNAIVIEAQVDKFGLEQLVSEDFELPMAMSSLYEETEDDEMQLDGNGRSLLWHKFKYYISYGALSANRIPCPPRSGRSYYTHHCYHATGPAHPYTRGCSAITRCRR

SEQ ID NO: 88 - protein, 100 aa, Picea sitchensis
  misc_feature (31)..(97): Pfam Name: RALF Pfam Description: Rapid ALkalinization Factor (RALF)
  misc_feature: Public GI ID no. 116790033
  misc_feature: Bit score of 213.1 for HMM based on sequences of Figure 9
  misc_feature: Functional Homolog Of SEQ ID NO. 77
MDGLITRSNPPPQPKCAMMEAWGECGANVDEENENEVGHGRLLRRIRYYISYGALAANRIPCPPRSGRSYYTRNCYRATEPVRPYHRSCTAITRCLRDTS

SEQ ID NO: 89 - DNA, 716 bp, Arabidopsis thaliana
  misc_feature: Ceres Clone ID no. 1346042
  misc_feature: Encodes the peptide sequence at SEQ ID NO. 90
aattagaacccccaaaatctcttcacaactgtaaaaccccaatcacctctttacatgtgacttccttattactctcttcttcttattttcctcctcttcttcttcgctctagtttcccccaacaatcgccatggcagcttcgtctctcaatctcctcctcattctctctcttctcactttcatttctctccagagatctgaatctctttccgataatccatctctcactcttctacccgacggattcgactggccgatctctcactccgatgaattcgatatcatcgacggtgaagaaagcttcgaagttacggaggaagacgacggcgtaacagatcgacggtcattgtactggcggaggacgaagtattacatatcgtacggtgcattgtcggcgaatagagtgccatgtcctcccagatctggaagatcgtactacactcataactgcttcagagctagaggtcccgttcatccgtatagccgaggctgctcgtcgatcactcgatgccggagatagatgaagaaagcttaaaactccatgggcattttcgtaattttgccaaccatggtttattattatgatgtttgtatttgtaatgttcgatgtttgtttgtaaaccgtgattagttacgttcgttaaacggtaaacccgatgattataatttcgagttctgctatagaaatggttaagtactaaagagtcgtgaggggt

SEQ ID NO: 90 - protein, 129 aa, Arabidopsis thaliana
  misc_feature (57)..(129): Pfam Name: RALF Pfam Description: Rapid ALkalinization Factor (RALF)
  misc_feature: Ceres Clone ID no. 1346042
  misc_feature: Bit score of 340.8 for HMM based on sequences of Figure 9
  misc_feature: Functional Homolog Of SEQ ID NO. 77
MAASSLNLLLILSLLTFISLQRSESLSDNPSLTLLPDGFDWPISHSDEFDIIDGEESFEVTEEDDGVTDRRSLYWRRTKYYISYGALSANRVPCPPRSGRSYYTHNCFRARGPVHPYSRGCSSITRCRR

SEQ ID NO: 91 - DNA, 491 bp, Brassica napus
  misc_feature: Ceres Clone ID no. 1118610
  misc_feature: Encodes the peptide sequence at SEQ ID NO. 92
aacttyctcttcttcttcttcgttttcgcctccaccatcaccatggcagcagctccgtctcttactctattcatcactctctcccttctcttcatttcactccagagatctgaatctctcccccagaatccatccatgattcttctaggcgacggattcgactggccgatctctcacggcgacgcattcgacatcgacggaggagaaagctttgaagatgtcgcggatcgacggtcattgtactggaagaggaggagatactacatctcttacggtgcattgtcggcgaacagagtaccgtgtcctcccagatctggaagatcgtactacactcacaactgcttcagagctagaggtccggtgcatccttacagccgaggctgctcctccatcactcggtgccggagatagaagaaaccaagggcattctcgtaattttccaatcacggactctgtttgtagttctcgttcgatttcgatgtattgtgtag

SEQ ID NO: 92 - protein, 122 aa, Brassica napus
  misc_feature (50)..(122): Pfam Name: RALF Pfam Description: Rapid ALkalinization Factor (RALF)
  misc_feature: Ceres Clone ID no. 1118610
  misc_feature: Bit score of 282.1 for HMM based on sequences of Figure 9
  misc_feature: Functional Homolog Of SEQ ID NO. 77
MAAAPSLTLFITLSLLFISLQRSESLPQNPSMILLGDGFDWPISHGDAFDIDGGESFEDVADRRSLYWKRRRYYISYGALSANRVPCPPRSGRSYYTHNCFRARGPVHPYSRGCSSITRCRR

SEQ ID NO: 93 - DNA, 496 bp, Brassica napus
  misc_feature: Ceres Clone ID no. 982000
  misc_feature: Encodes the peptide sequence at SEQ ID NO. 94
ataaatggcgcattagttaaaacctcaagtcacctcttggcatgtgacttactagttcctctactctcttccattattattttccttcttctttgctttcgtctcaagcatatcaccatggcagcagctccgtctcttaacctcctcctcatcattctctctcttctcctcgtttcactcccaagatccgaatctctccccgagaatccatccctgattcttctaggcgagggattcgactggccgatctctgatggcggcattggcggaggagaaagcttcgaagacgcggaggaggaagaggacaacgtcggtgttgtagatcgacggtcattgtactggcacaggaagagatattacatatcgtacggtgcattgtcggcgaacagagtcccgtgtcctcccagatctggaagatcgtactacactcacaactgcttcagagctagaggtcccgtgcatccctacagtcgaggctgctcgtccatcactcgat

SEQ ID NO: 94 - protein, 126 aa, Brassica napus
  misc_feature (57)..(126): Pfam Name: RALF Pfam Description: Rapid ALkalinization Factor (RALF)
  misc_feature: Ceres Clone ID no. 982000
  misc_feature: Bit score of 255.0 for HMM based on sequences of Figure 9
  misc_feature: Functional Homolog Of SEQ ID NO. 77
MAAAPSLNLLLIILSLLLVSLPRSESLPENPSLILLGEGFDWPISDGGIGGGESFEDAEEEEDNVGVVDRRSLYWHRKRYYISYGALSANRVPCPPRSGRSYYTHNCFRARGPVHPYSRGCSSITR

SEQ ID NO: 95 - DNA, 567 bp, Brassica napus
  misc_feature: Ceres Clone ID no. 959670
  misc_feature: Encodes the peptide sequence at SEQ ID NO. 96
attgtctcacacactcgaaaactctcacacgaaggtcgaaaggtccataaatggcgcattagttaaaacctcaaaccacctcttcgcatgtgacttgctagttgctctactctcttccattattattttccttcttctttgcttgagtctcaagcatatcgccatggcagcagctccgtctcttaacctcctcatcatcacactatttcttctcatcatttcactcccaagatctgaatctctccccgagaatccatccctgcttgttctaggcgacggattcgactggccgatctctgatggcggcattggcggaggagaaagcttcgaagacgcggaggaggaagaggacaacgtcggtgtcggagatcgacggtcattgtactggcacaggaagagatactacatatcgtacggtgcattgtcggcgaacagagtcccgtgtcctcccagatctggaagatcgtactacactcacaactgcytcagagctagaggtccggtgcatccctacactcgaggctgstcgtccatcactcgatgccggagataactaggagaaaagac

SEQ ID NO: 96 - protein, 129 aa, Brassica napus
  misc_feature (57)..(129): Pfam Name: RALF Pfam Description: Rapid ALkalinization Factor (RALF)
  misc_feature: Ceres Clone ID no. 959670
  misc_feature: Bit score of 267.2 for HMM based on sequences of Figure 9
  misc_feature: Functional Homolog Of SEQ ID NO. 77
  misc_feature (108)..(108): Xaa is any aa, unknown, or other
  misc_feature (121)..(121): Xaa is any aa, unknown, or other
MAAAPSLNLLIITLFLLIISLPRSESLPENPSLLVLGDGFDWPISDGGIGGGESFEDAEEEEDNVGVGDRRSLYWHRKRYYISYGALSANRVPCPPRSGRSYYTHNCXRARGPVHPYTRGXSSITRCRR

SEQ ID NO: 97 - DNA, 422 bp, Brassica napus
  misc_feature: Ceres Clone ID no. 952522
  misc_feature: Encodes the peptide sequence at SEQ ID NO. 98
gtgtgtgtgtgtgtgacctgctgctctcttcttactcgctttcttctccagcattgccatggaagctccgtctcttactcttaacctcctcctccttatcattgtctctcttctcttcatttcactcccgagatctgaacctctcccggaaaacccatccttggttcttcttggcgacggattcgaatggccgacctctcacgtcgacgcattcgacatagaaagctttgacgatgcgggggaggaggaagacgacgacgtcggtgtatcagatcgacggtcgttgtactggaaaaggaggagatactacatctcctacggtgcattgtcggcgaacagagtcccctgtcctccgagatctggaaggtcttactacactcacaactgctttagagctagaggtccagttcatacctacactc

SEQ ID NO: 98 - protein, 121 aa, Brassica napus
  misc_feature (60)..(121): Pfam Name: RALF Pfam Description: Rapid ALkalinization Factor (RALF)
  misc_feature: Ceres Clone ID no. 952522
  misc_feature: Bit score of 213.6 for HMM based on sequences of Figure 9
  misc_feature: Functional Homolog Of SEQ ID NO. 77
MEAPSLTLNLLLLIIVSLLFISLPRSEPLPENPSLVLLGDGFEWPTSHVDAFDIESFDDAGEEEDDDVGVSDRRSLYWKRRRYYISYGALSANRVPCPPRSGRSYYTHNCFRARGPVHTYT

SEQ ID NO: 99 - DNA, 888 bp, Gossypium hirsutum
  misc_feature: Ceres Clone ID no. 1914539
  misc_feature: Encodes the peptide sequence at SEQ ID NO. 100
acaaacatcacaaaatcaacggcaaaagccaatctaaaaccatggaatgctaccacacagaacacgatcaattccatttgattggctcaagaaccgaagcacgcggtaatggagggcatcgattgaaagcacagctgtaaatcaatcatctctgtgctgattgtgaccccatctgtccccttaaaccgaaccccaaaacgaaaaccacttcaattattctcttcttcatccaaaactctccttgcaagcaacttgttactgacaatggcttcttcttcacttctcagcaagctccttttgctccttttcatctcttacattgtgttgtggggatcgaaagtggatgcccaagttgaagagacaagcttgaagctgatgagagatgctttggaatggccgctttctgtgtcactttacagtgacttaaacgacaatgaaggtgaagaagaggtagatggtgaagaggaaactgggcatagtcgtagatccttgttttggacgagaatgaggtattacatttcgtactcggcgctttctgctaatagaatcccatgtcccccaagatcaggaaggtcttattataccaacaactgtttcaaggcacatggatcagtccacccttactctagaggatgctccaggattacccgctgcaggagatgagtttttcttttttctttttctttttagtggatgctttgggtttgtaatattttaatgtgtattttgtgagaactatggaggaattgagtgttgaggtttcgggttttgccatttttgtgagtttttgtttcttggtttaatgtgtggattagcaatgtaattatgaacctatgatgtgtgatttggttaagatacttttaaggttatggttatggtagttaccgt

SEQ ID NO: 100 - protein, 132 aa, Gossypium hirsutum
  misc_feature (58)..(132): Pfam Name: RALF Pfam Description: Rapid ALkalinization Factor (RALF)
  misc_feature: Ceres Clone ID no. 1914539
  misc_feature: Bit score of 297.0 for HMM based on sequences of Figure 9
  misc_feature: Functional Homolog Of SEQ ID NO. 77
MASSSLLSKLLLLLFISYIVLWGSKVDAQVEETSLKLMRDALEWPLSVSLYSDLNDNEGEEEVDGEEETGHSRRSLFWTRMRYYISYSALSANRIPCPPRSGRSYYTNNCFKAHGSVHPYSRGCSRITRCRR

SEQ ID NO: 101 - DNA, 756 bp, Glycine max
  misc_feature: Ceres Clone ID no. 668581
  misc_feature: Encodes the peptide sequence at SEQ ID NO. 102
gattaacttcacacttcactctctagtcatggcttcttctcttcctcttctcaaccttcttaccctcgctctgtcactactcttctgcattgccttaacttccgaggttggcgtgcaggcgcagatggaggagacaggcttgaacctcatgtcggaggcgttggagtggccaaccgcaatgtcgctctacgacgaagacagcgaagaagaggatgtccagaacggttacagtcggagatcgttgttctggcggaggatgaagtactacatctcctacggcgctctttccgcgaaccgaatcccgtgcccacctcgttctggtagatcttactacacccacaactgctacagggcccgaggccccgttcacccttactccagaggctgctctgtcatcacgcgctgccggagatgagtgagttcggatctgatcacacgcgcgcctcacgcttcagatcgcaaataaaaaaaaccaccgtctagggtcttgttttgttagtgtactagatttattgtctatttaagcaagtcaaaagtgtcgtgtttcagtaacggttctcgttgcgctgcgctattttcatgaaccatctgtttgcttgctttgtgtgttactttatcatattcattcctttgtataaactcgaatgaactctatacgtggatgcgcaaatctgcttcctatctttgtattcccatcgcttacactctcttacgttgcaaattatgtatcctatctcatttcctttttcctttgtg

SEQ ID NO: 102 - protein, 128 aa, Glycine max
  misc_feature (57)..(128): Pfam Name: RALF Pfam Description: Rapid ALkalinization Factor (RALF)
  misc_feature: Ceres Clone ID no. 668581
  misc_feature: Bit score of 289.7 for HMM based on sequences of Figure 9
  misc_feature: Functional Homolog Of SEQ ID NO. 77
MASSLPLLNLLTLALSLLFCIALTSEVGVQAQMEETGLNLMSEALEWPTAMSLYDEDSEEEDVQNGYSRRSLFWRRMKYYISYGALSANRIPCPPRSGRSYYTHNCYRARGPVHPYSRGCSVITRCRR

SEQ ID NO: 103 - DNA, 639 bp, Gossypium hirsutum
  misc_feature: Ceres Clone ID no. 1914939
  misc_feature: Encodes the peptide sequence at SEQ ID NO. 104
aagccatggcttcttcttcatcagtacttctcagcaagcttattctcccccttttcatcactcacattgtccttacaacctccatagtcgaagctcaagtcgaagatacaagtttgaagctggtcagagatgctttagaaaggccacttccaatctcactttacagtgagttaaacgacgatgaagaagccgatgaagagatagatgatgatgaaggtgaaaatgggtacagtcgaagatctttgttttggaagagaatgaggtattacatttcatacggggcgctttgggctaacaggatcccgtgcccaccaaggtcaggcagatcttattacactcacaactgtttcaaggtccacgggcctgttcatccttacactaggggttgttcaaggatcactcgctgcaggagatgatgagcttgttaggaaaaaaaagggggggatgtaaaatcactaaaatggtgcaagctttgagtgctaagctagctaaaatattatgagtttttggtcttctcattttcttttttattaatgatggattagcaatgtgattgtgaacttattataacgagcattcgtgttcaagtatttgatcatgtgatgggttagaataattagattgcagaagattcaagtt

SEQ ID NO: 104 - protein, 136 aa, Gossypium hirsutum
  misc_feature (64)..(136): Pfam Name: RALF Pfam Description: Rapid ALkalinization Factor (RALF)
  misc_feature: Ceres Clone ID no. 1914939
  misc_feature: Bit score of 301.3 for HMM based on sequences of Figure 9
  misc_feature: Functional Homolog Of SEQ ID NO. 77
MASSSSVLLSKLILPLFITHIVLTTSIVEAQVEDTSLKLVRDALERPLPISLYSELNDDEEADEEIDDDEGENGYSRRSLFWKRMRYYISYGALWANRIPCPPRSGRSYYTHNCFKVHGPVHPYTRGCSRITRCRR

SEQ ID NO: 105 - DNA, 644 bp, Glycine max
  misc_feature: Ceres Clone ID no. 723694
  misc_feature: Encodes the peptide sequence at SEQ ID NO. 106
cacacttcactctctagtcatggcttcttctcttcctcttctcaaccttcttaccctcgctctgtcactactcttctgcattgccttaacttccgaggttggcgtgtaggcgcagatggaggagacaggcttgaacctcatgtcggaggcgttggagtggccaaccgcaatgtcgctctacgacgaagacagcgaagaagaggatgtccagaacggttacagtcggagatcgttgttctggcggaggatgaagtactacatctcctacggcgctctttccgcgaaccgaatcccgtgcccacctcgttctggtagatcttactacacccacaactgctacagggcccgaggccccgttcacccttactccagaggctgctctgtcatcacgcgctgccggagatgagtgagttcggatctgatcacacgcgcgcctcacgcttcagatcgcaaataaaaaaaaccaccgtctagggtcttgttttgttagtgtactagatttattgtctatttaagcaagtcaaaagtgtcgtgtttcagtaacggttctcgttgcgctgcgctattttcatgaaccatctgtttgcttgctttgtgtgttactttatcatattcattcctttgtataaactcgaatgaactcg

SEQ ID NO: 106 - protein, 96 aa, Glycine max
  misc_feature (25)..(96): Pfam Name: RALF Pfam Description: Rapid ALkalinization Factor (RALF)
  misc_feature: Ceres Clone ID no. 723694
  misc_feature: Bit score of 229.2 for HMM based on sequences of Figure 9
  misc_feature: Functional Homolog Of SEQ ID NO. 77
MEETGLNLMSEALEWPTAMSLYDEDSEEEDVQNGYSRRSLFWRRMKYYISYGALSANRIPCPPRSGRSYYTHNCYRARGPVHPYSRGCSVITRCRR

SEQ ID NO: 107 - DNA, 396 bp, Populus balsamifera subsp. trichocarpa
  misc_feature: Ceres Annot ID no. 1456949
  misc_feature: Encodes the peptide sequence at SEQ ID NO. 108
atgggaaattctacattgcaacactatttcaccttgttgatagtcctcttcactatctttcttgctttcagtccaagaatccaggctcaagtcgatgaaacaagcttgaaggcaatgggcgatgcgctagaatggccaatgtccatgtatttcgatgaaagtagtgagcttgatggtggattggtggatcttgatgacggtgaagaaactagtcgtagatctttactttggacgagaacgcattactacatctcatatggagctttgtctgccaatagaattccttgtcctgcaaggtccggtagatcttactatagccacaactgcttcaagtctaggattcctgtcaatccctactcaagagggtgttctaggatcactcgttgccggagatga

SEQ ID NO: 108 - protein, 131 aa, Populus balsamifera subsp. trichocarpa
  misc_feature (59)..(131): Pfam Name: RALF Pfam Description: Rapid ALkalinization Factor (RALF)
  misc_feature: Ceres Annot ID no. 1456949
  misc_feature: Bit score of 272.3 for HMM based on sequences of Figure 9
  misc_feature: Functional Homolog Of SEQ ID NO. 77
MGNSTLQHYFTLLIVLFTIFLAFSPRIQAQVDETSLKAMGDALEWPMSMYFDESSELDGGLVDLDDGEETSRRSLLWTRTHYYISYGALSANRIPCPARSGRSYYSHNCFKSRIPVNPYSRGCSRITRCRR

SEQ ID NO: 109 - DNA, 366 bp, Populus balsamifera subsp. trichocarpa
  misc_feature: Ceres Annot ID no. 1539918
  misc_feature: Encodes the peptide sequence at SEQ ID NO. 110
atgaaggtttcagctctgagtttgattgctgcctccttaacttttctcattgttgttaaagctcaggttgatttaaaggatttcatccaactgacaagtgaagatcttgaatggccatcagcgttgtctgtctacgatgagttaagtgacactgaagacgaagagtatggcggcgggtctcataggaggtctctgcatgggagagcaaagcactattacgtatcatatggtgctctctctgcaaacagggtgccttgcccagctcgctcagggaggtcttactatacccattactgtttccgatcaagaggacaggctaacccctacaccagaggttgctcttgtatcactcactgcaggagataa

SEQ ID NO: 110 - protein, 121 aa, Populus balsamifera subsp. trichocarpa
  misc_feature (50)..(121): Pfam Name: RALF Pfam Description: Rapid ALkalinization Factor (RALF)
  misc_feature: Ceres Annot ID no. 1539918
  misc_feature: Bit score of 197.4 for HMM based on sequences of Figure 9
  misc_feature: Functional Homolog Of SEQ ID NO. 77
MKVSALSLIAASLTFLIVVKAQVDLKDFIQLTSEDLEWPSALSVYDELSDTEDEEYGGGSHRRSLHGRAKHYYVSYGALSANRVPCPARSGRSYYTHYCFRSRGQANPYTRGCSCITHCRR

SEQ ID NO: 111 - DNA, 354 bp, Solanum lycopersicum
  misc_feature: Ceres Annot ID no. 8456138
  misc_feature: Encodes the peptide sequence at SEQ ID NO. 112
atggagtctccaatacttctcttccttatcatcttcttattcacgattggcaaaaatgcagttgttgttgaagcagaagttgatagatttggtttagaacaagtggtgagtgaagattttgagttgccaatgggaatgtcgggtgatgatgagatccagttggatggaaatggaagatctctattgtggaacaaattcaagtactacatttcgtacggagcattatcagctaacagaatcccctgcccaccacggtctggcagatcgtattacacgcaccattgttatcatgctacaggtccagctcatccttacactagaggttgctctgctatcactcgttgccgtagatga

SEQ ID NO: 112 - protein, 117 aa, Solanum lycopersicum
  misc_feature (46)..(117): Pfam Name: RALF Pfam Description: Rapid ALkalinization Factor (RALF)
  misc_feature: Ceres Annot ID no. 8456138
  misc_feature: Bit score of 256.6 for HMM based on sequences of Figure 9
  misc_feature: Functional Homolog Of SEQ ID NO. 77
MESPILLFLIIFLFTIGKNAVVVEAEVDRFGLEQVVSEDFELPMGMSGDDEIQLDGNGRSLLWNKFKYYISYGALSANRIPCPPRSGRSYYTHHCYHATGPAHPYTRGCSAITRCRR

SEQ ID NO: 113 - DNA, 426 bp, Populus balsamifera subsp. trichocarpa
  misc_feature: Ceres Annot ID no. 1486506
  misc_feature: Encodes the peptide sequence at SEQ ID NO. 114
atgaaggtttcagctctgagtttgattgctgcctccttaacttttctcattgttgttaaagctcaggttgatttaaaggatttcatccaactgacaagtgaagatcttgaatggccatcagcgttgtctgtctacgatgagttaagtgacactgaagacgaagagtatggcggcgggtctcataggaggtctctgcatgggagagcaaagcactattacgtatcatatggtgctctctctgcaaacagggtgccttgcccagctcgctcagggaggtcttactatacccattactgtttccgatcaagaggacaggctaacccctacaccagagcatgtgcagagattcagggggcttcacctcttgatttgtccgacactggagaagacaaggaatcgatgcggcgctttagatgctttgattaa

SEQ ID NO: 114 - protein, 141 aa, Populus balsamifera subsp. trichocarpa
  misc_feature (50)..(120): Pfam Name: RALF Pfam Description: Rapid ALkalinization Factor (RALF)
  misc_feature: Ceres Annot ID no. 1486506
  misc_feature: Bit score of 164.5 for HMM based on sequences of Figure 9
  misc_feature: Functional Homolog Of SEQ ID NO. 77
MKVSALSLIAASLTFLIVVKAQVDLKDFIQLTSEDLEWPSALSVYDELSDTEDEEYGGGSHRRSLHGRAKHYYVSYGALSANRVPCPARSGRSYYTHYCFRSRGQANPYTRACAEIQGASPLDLSDTGEDKESMRRFRCFD

SEQ ID NO: 115 - protein, 139 aa, Picea sitchensis
  misc_feature (66)..(136): Pfam Name: RALF Pfam Description: Rapid ALkalinization Factor (RALF)
  misc_feature: Public GI ID no. 116786293
  misc_feature: Bit score of 149.5 for HMM based on sequences of Figure 9
  misc_feature: Functional Homolog Of SEQ ID NO. 77
MGRLGTMLLLVVSLFLMAESLHTALNSQEVTATSNWLGSVASYEQRGFESSAGQICDGALGECNDETEEEFMMDSEAHGRLLRRVRYYISYGALAANRVPCRPRSGRSYYTRNCYAATGPVRPYHRSCTAITRCKRYTS

SEQ ID NO: 116 - DNA, 1296 bp, Arabidopsis thaliana
  misc_feature: Ceres Annot ID no. 1355066
  misc_feature: Encodes the peptide sequence at SEQ ID NO. 117
atgaggctcctcttcagcttctgcttcttcttcttcatgatcatctttaccgcaactgcttatgatccattagatcctagtggtaacattacaatcaaatgggatattatgtcctggacggcagatggctatgtggctacggtaactatgaacaacttccaaatctaccggcacatacaaaaccctggttggacattaggttggacatgggcaaagaaagaggtgatttggtcaatggttggtgcacaaacaacagaacaaggagactgttccaagtttaagggaaatgtacctcattgctgtaagaaaacccctacagttgttgatctcttgccaggtgtgccttataatcaacagttctcaaactgttgcaaaggaggtgtaattggagcttggggtcaagatccatcagccgctgtatcccagtttcaggttagtgctggtttagctggaactacaaacaagactgtcaagcttcctaagaacttcactttgcttggtcccggccctggttacacttgcggtcctgccaaaatcgtgccctctaccgtttttctcacaactgacaaacggcgaaaaacacaagctttgatgacatggaatgttacctgcacatactcacagtttttagcaagaaagcatccaagctgttgtgtctccttctcttctttctacaacgacaccataactccttgcccgtcttgtgcctgtggctgcgagaacaaaaagagctgcgtcaaggctgattctaagattctaaccaagaaaggtctcaacacaccaaaaaaggacaacactcctttgttgcaatgcacacatcacatgtgccctgttagagtccactggcacgttaaaactaactacaaagactattggcgagtgaagatagcaatcacaaatttcaattaccggatgaatcatacactctggactttagcaattcagcatccaaatctcaacaatgtgactcaagttttcagctttgactacaaaccagtctctccttacggatccataaatgatactggaatgttctatggaacgaagttttacaatgatttattaatggaagctggaccttcagggaatgtgcaatcagaggttttgctacagaaagatcaaaagacttttactttcaagcaaggttgggcttttcctagaaaagtttactttaatggtgatgaatgtatgttacctccaccagattcatacccttttctaccaaactctgcacaagggaactttgcttcgttctcactcaccattcttcttctcctattcatctcaatatggtga

SEQ ID NO: 117 - protein, 431 aa, Arabidopsis thaliana
  misc_feature (44)..(208): Pfam Name: Phytochel_synth Pfam Description: Phytochelatin synthetase-like
  misc_feature: Ceres Annot ID no. 1355066
  misc_feature: Bit score of 1139.8 for HMM based on sequences of Figure 3
MRLLFSFCFFFFMIIFTATAYDPLDPSGNITIKWDIMSWTADGYVATVTMNNFQIYRHIQNPGWTLGWTWAKKEVIWSMVGAQTTEQGDCSKFKGNVPHCCKKTPTVVDLLPGVPYNQQFSNCCKGGVIGAWGQDPSAAVSQFQVSAGLAGTTNKTVKLPKNFTLLGPGPGYTCGPAKIVPSTVFLTTDKRRKTQALMTWNVTCTYSQFLARKHPSCCVSFSSFYNDTITPCPSCACGCENKKSCVKADSKILTKKGLNTPKKDNTPLLQCTHHMCPVRVHWHVKTNYKDYWRVKIAITNFNYRMNHTLWTLAIQHPNLNNVTQVFSFDYKPVSPYGSINDTGMFYGTKFYNDLLMEAGPSGNVQSEVLLQKDQKTFTFKQGWAFPRKVYFNGDECMLPPPDSYPFLPNSAQGNFASFSLTILLLLFISIW

SEQ ID NO: 118 - protein, 440 aa, Cleome spinosa
  misc_feature (49)..(213): Pfam Name: Phytochel_synth Pfam Description: Phytochelatin synthetase-like
  misc_feature: Public GI ID no. 90657534
  misc_feature: Bit score of 1163.7 for HMM based on sequences of Figure 3
  misc_feature: Functional Homolog Of SEQ ID NO. 117
MRLSISGFFFFFFFFFSVFIYCTSAYDPLDPNGNVTIKWDVMSWTPDGYVAVVAMNNFQMYRHIPNPGWTLGWTWAKKEVIWSMVGAQTTEQGDCSKFKGNVPHCCKKTPTLVDLLPGVPYNQQFSNCCKGGVVAAWGQDPSASVSQFQVSVGLAGTSNKTVKLPKNFTLLGPGLGYTCGPAKIVPSTIFLTPDKRRKTQALMTWNVTCTYSQFLARKHPSCCVSFSSFYNDTITPCPSCACGCESKKGCVKSDSKILSVKGINTPRKDNAPLLQCTHHMCPVRVHWHVKVNYKDYWRVKIAVTNFNYRMNFSLWTLAIQHPNLNNVTQVFSFDYKPLVPYESINDTGMFYGMKYYNDLLMEAGPFGNVQSEVLLQKDRNTFTFKQGWAFPRKVYFNGDECMLPPPDTYPFLPNSAHGNLSSLWTLPLALLLLLLLISIW

SEQ ID NO: 119 - DNA, 1587 bp, Glycine max
  misc_feature: Ceres Clone ID no. 1237946
  misc_feature: Encodes the peptide sequence at SEQ ID NO. 120
aaaacttttgtcactgaaggtgtcttggagccaattgtagcagttggtaacatcaaacacatattcagacaatgaggcttgtcgtctcagctctttgtgttcttgtgttattctcttgtgcagttgcttatgatcctttggatccaaacggaaacgtaacaatcaaatgggatgtaatgtcttggacaccagatggctatgtggctgtggtaacaatgcacaacttccaaatgtttcggcacatcatgaatcctggatggaccttgggatggacatgggcaaagaaagaagtcatttggtccatgataggagctcaaaccacagaacaaggagattgctctaagttcaaaggcaacatacctcattgctgcaagaaaattcccacagttgtggaccttctccctggtgtaccttacaaccagcaattctcaaactgctgcaagggtggagtagtggcagcatggggccaagatccttcacaagctatctcttccttccaagtgagtgtaggccaagctggtacctcaaacaagacagttaaacttcccaagaacttcactctctttgctccaggaccaggctacacttgtggccctgcaaagattgttccttccaccaattttcttacgcctgacaagcgccgcaagactcaagcactaatgacatggaatgttacctgcacatactcacagtttctggcaagaaagaacccaagttgttgtgtatctttgtcatccttttacaatgaaaccattaccccttgtccctcttgtgcatgtggctgccagaacaagaagcattgtgtcaagggaaactccaaaattctcagcatggtgggggttcacactccaaagaaagacaatgaaccattgctgcagtgcactcatcacatgtgtccaatcagggtccactggcatgtgaagactaactataaggactattggcgagtcaaggttgccataacaaacttcaattacagaatgaatcactccctttggtctcttgctgttcagcatccaaatctcaacaatctcacacaagttttcagtttcaattacaagccacttcttccctatggatccataaatgatactggcatgttctatggcatgaagtacttcaatgatcttctaatggaagctggaccaactgggaatgttcaatcagagttgcttcttcagaaggacaaggatgcattcacattcaagcagggttgggcatttcctcgcaaggtttactttaatggtgatgaatgcatgctgccaccacctgacacctacccttttctccctaactctgctcctgcaagcctacttaacttccctgcgttcatgttgttattgttcttcttgcttgcagtttggtgaattggtgcatattgtgtcagaattttgtgaaatttttgaaaccatgtataccttcttaatggtaacgtgacaataggcatgaatactcaaattctttggaaacactaagccaaatctcatggctgtgttttatctgacatgtgagcaccaaaggggatgctaatatgtaaatctcaacagtgattttgtctgaatcatagattgatgatgctattactcc

SEQ ID NO: 120 - protein, 431 aa, Glycine max
  misc_feature (43)..(207): Pfam Name: Phytochel_synth Pfam Description: Phytochelatin synthetase-like
  misc_feature: Ceres Clone ID no. 1237946
  misc_feature: Bit score of 1142.4 for HMM based on sequences of Figure 3
  misc_feature: Functional Homolog Of SEQ ID NO. 117
MRLVVSALCVLVLFSCAVAYDPLDPNGNVTIKWDVMSWTPDGYVAVVTMHNFQMFRHIMNPGWTLGWTWAKKEVIWSMIGAQTTEQGDCSKFKGNIPHCCKKIPTVVDLLPGVPYNQQFSNCCKGGVVAAWGQDPSQAISSFQVSVGQAGTSNKTVKLPKNFTLFAPGPGYTCGPAKIVPSTNFLTPDKRRKTQALMTWNVTCTYSQFLARKNPSCCVSLSSFYNETITPCPSCACGCQNKKHCVKGNSKILSMVGVHTPKKDNEPLLQCTHHMCPIRVHWHVKTNYKDYWRVKVAITNFNYRMNHSLWSLAVQHPNLNNLTQVFSFNYKPLLPYGSINDTGMFYGMKYFNDLLMEAGPTGNVQSELLLQKDKDAFTFKQGWAFPRKVYFNGDECMLPPPDTYPFLPNSAPASLLNFPAFMLLLFFLLAVW

SEQ ID NO: 121 - protein, 453 aa, Populus balsamifera subsp. trichocarpa
  misc_feature (64)..(228): Pfam Name: Phytochel_synth Pfam Description: Phytochelatin synthetase-like
  misc_feature: Public GI ID no. 118488472
  misc_feature: Bit score of 1150.3 for HMM based on sequences of Figure 3
  misc_feature: Functional Homolog Of SEQ ID NO. 117
MEFDKSAKDCYQSLQRSLLAEMKFIFLIALVFMIVPHAAAYDPLDPNGNITIKWDVMSWTPDGYVATVTMSNFQMYRHIISPGWTLSWSWAKKEVLWSMVGAQTTEQGDCSKFKGNIPHCCKKTPTVVDLLPGVPYNQQFSNCCKGGVMAAWGQDPTASVSAFQVSVGLAGTSNKTVKLPKNFTLLGPGPGYTCGPAKVVPSTVFLTPDRRRKTQALMTWNVTCTYSQFLASKNPTCCVSFSSFYNETITPCPTCACGCQNKNSCVKSNSKESHKKGINTPKKDNTPLLQCTHHMCPIRVHWHVKVNYRDYWRAKVAVTNFNYRMNYTEWTLVVQHPNLNNVTQVFSFDYKPLVPYESINDTGMFYGMKFYNDLLMEAGPFGNVQSEVLLQKDKNTFSLKQGWAFPRKVYFNGDECMLPPPDTYPYLPNSAYANPTSILSMAASLLLILLSMG

SEQ ID NO: 122 - protein, 463 aa, Phaseolus vulgaris
  misc_feature (75)..(239): Pfam Name: Phytochel_synth Pfam Description: Phytochelatin synthetase-like
  misc_feature: Public GI ID no. 38194917
  misc_feature: Bit score of 1144.2 for HMM based on sequences of Figure 3
  misc_feature: Functional Homolog Of SEQ ID NO. 117
MRLVISAAVCVLVLFSYAGEITSTLYAEFASLSFTFHTRPTDFLMFLIVAAYDPLDPNGNVTIKWDVVSWTPDGYVAVVTMSNFQMFRHIMNPGWTLSWSWAKKEVIWSMVGAQTTEQGDCSKFKGNVPHCCKKTPTVVDLLPGVPYNQQFSNCCKGGVVAAWGQDPSSAVSSFQVSIGLAGTSNKTVKLPKNFTLLGPGPGYTCGPAKVVPSTVFLTADKRRKTQALMTWNVTCTYSQFLARKNPGCCVSLSSFYNETITPCPSCACGCQNKRNCIKSDSKRINMVGIHTPKKDNEPLLQCTHHMCPIRVHWHVKLNYMDYWRVKVAVTNFNYRMNYSLWTLAVQHPNLNNVTQVFSFDYKPILPYESINDTGMFYGMKYFNDLLMEAGPTGNVQSEILLQKDKDTFTLKQGWAFPRKVYFNGEECMLPPPDTYPILPNSAPVNLLNFTVFILTMLVMLALW

SEQ ID NO: 123 - protein, 460 aa, Vitis vinifera
  misc_feature (72)..(236): Pfam Name: Phytochel_synth Pfam Description: Phytochelatin synthetase-like
  misc_feature: Public GI ID no. 157341292
  misc_feature: Bit score of 1142.1 for HMM based on sequences of Figure 3
  misc_feature: Functional Homolog Of SEQ ID NO. 117
MRFVISAFFFLMMFSYTGELLDGSQASIRFNFVPLVQFSCSVFVYAAAYDPLDPNGNITIKWDIMSWTPDGYVAVVTMHNFQMYRHIISPGWTLGWTWAKKEVIWSMVGAQTTEQGDCSKFKGNIPHCCKKTPTVVDLLPGVPYNQQFSNCCKGGVVSSWGQDPAASVSAFQVSVGLAGTSNKTVKLPKNFTLLGPGPGYTCGIAKIVPPTNFLTPDRRRKTQALMTWNVTCTYSQLRARKNPSCCVSFSSFYNETITPCPSCACGCQNKNNCVQSDSKLLSMVGINTPRKDNVPLLQCTHHMCPVRVHWHLKINYKDYWRVKVSITNFNYRLNYTLWTLVVQHPNLNNVTQVFSFDYKPLVPYESINDTGMFYGMKFYNDQLMEAGPFGNVQSEVLFQKDNSFTFKQGWAFPRKVYFNGDECMLPLPETYPFLPNSAHQNLLAFSTFISSVIFLLVTVW

SEQ ID NO: 124 - DNA, 1846 bp, Panicum virgatum
  misc_feature: Ceres Clone ID no. 1957107
  misc_feature: Encodes the peptide sequence at SEQ ID NO. 125
acgcaacgcaaccaaccaggcgtcggccagggccgccagccagctgatcgacgcctgcaggtctctctggtggtgacgtgccatctcgatcgatcgattccctcctccttggccggccggccgcccggcctttatttgccggcctcgacgaccttcctctaggaacttgtgctaccagctagcagcagcagtcagtagcggtagtgttcttgctgcggacgcggccggccggctcgacgtccacgatgaggctccgcgactccgccgcgatggtggctctggtgctcgcgctcacctgctccgttgcagtgggctacgatcccctggaccccaacggcaacatcaccatcaagtgggatgtcatctcctggacgcccgacgggtacgtggccatggtgacgatgagcaactaccagatgtaccgccacatcatggcgcccgggtggacggtggggtggtcgtgggccaagaaggaggtgatctggtccatggtcggcgcgcaggccacggagcagggcgactgctccaagttcaaggccggcatcccgcactgctgcaagcgcacccccgccgtcgtcgacctcctcccgggcgtcccctacaaccagcagatcgccaactgctgcaaggccggcgtcgtcgccgcctacggccaggaccctgccgccgccgtctccgccttccaggtctccgtcggcctcgccggcaccaccaacaagacggtcaagctgcccaggaacttcaccctccagggccccggccccggctacacctgcggccccgcccggatcatcccctccaccgtctacctcacccccgaccgccgccgccggacgcaggcgctcatgacctgggcgctcacctgcacctactcgcagcagctcgcctccaagtacccctcctgctgcgtctccttctcctccttctacaacagcaccatcgtgccctgcgcccgctgcgcctgcggctgcggccacggcggccacggcgccgccggctgcatcgccggcgactccaagcgggcgctctcccccggcgtcaacacgccgcgcaaggacggccagccgctgctccagtgcacgccgcacatgtgcccggtgcgcgtccactggcacgtcaagctcaactacaaggactactggcgcgccaagatcgccatcaccaacttcaactaccggatcaactacacgcagtggacgctggtggcgcagcaccccaacctggacaacgtcaccgaggtcttcagcttccagtacaagccgctgctcccctacggcgccatcaacgacaccggcatgttctacgggctcaagttctacaacgacctgctcatggaggccgggcccttcggcaacgtgcagtccgaggtgctcatgcgcaaggacgcaagaaccttcaccttcagccagggctgggcgttcccgcggaagatctacttcaacggcgacgagtgcaagatgccgccgccggactcgtacccctacctgcccaactccgccccgctcgcggctccggtcatcgccaccgcggcctcggcgttcctgctggtggcgctgctcctggtggcgtgatcggtcatgggaattgggatgggctgccagggagcagagtaggcatggcgctctggagactgaaacgcttggcaatgtcatgtgtgttgttgcctgtgcagctgcacatagagagactagcagaccaatcaggctggcagagatcctggcacttttgagtctccaattactttttagacagcctgatcgagaacaaatgatagtatacatagtagagcacaaccttttttctgtggtttcgtcatgtacacataatgcagattattaattgttcg

SEQ ID NO: 125 - protein, 441 aa, Panicum virgatum
  misc_feature (47)..(211): Pfam Name: Phytochel_synth Pfam Description: Phytochelatin synthetase-like
  misc_feature: Ceres Clone ID no. 1957107
  misc_feature: Bit score of 1129.6 for HMM based on sequences of Figure 3
  misc_feature: Functional Homolog Of SEQ ID NO. 117
MRLRDSAAMVALVLALTCSVAVGYDPLDPNGNITIKWDVISWTPDGYVAMVTMSNYQMYRHIMAPGWTVGWSWAKKEVIWSMVGAQATEQGDCSKFKAGIPHCCKRTPAVVDLLPGVPYNQQIANCCKAGVVAAYGQDPAAAVSAFQVSVGLAGTTNKTVKLPRNFTLQGPGPGYTCGPARIIPSTVYLTPDRRRRTQALMTWALTCTYSQQLASKYPSCCVSFSSFYNSTIVPCARCACGCGHGGHGAAGCIAGDSKRALSPGVNTPRKDGQPLLQCTPHMCPVRVHWHVKLNYKDYWRAKIAITNFNYRINYTQWTLVAQHPNLDNVTEVFSFQYKPLLPYGAINDTGMFYGLKFYNDLLMEAGPFGNVQSEVLMRKDARTFTFSQGWAFPRKIYFNGDECKMPPPDSYPYLPNSAPLAAPVIATAASAFLLVALLLVA

SEQ ID NO: 126 - DNA, 1341 bp, Sorghum bicolor
  misc_feature: Ceres Annot ID no. 8640603
  misc_feature: Encodes the peptide sequence at SEQ ID NO. 127
atggggctccgcgactcctccgtgctgctggccgctctgtccctcgcgctcgcctactgctccgtttcagtggtggcctacgatcccctggaccctcggggcaacatcacgataaagtgggacgtgatctcatggacgcccgacgggtacgtggcgatggtgacgatgagcaactaccagatgtaccggcacatcatgtccccgggctggacggtgggctggtcgtgggcgaagaaggaggtgatctggtccatcgtcggcgcgcaggccacggagcagggcgactgctccaagttcaaaggcggcatccctcactgctgcaagcgcacccccgccgtggtcgacctcctccccggggtgccctacaaccagcagatcgccaactgctgcaaggccggcgtcgtgtcggcgtacggccaggaccaggccggctccgtctccgcgttccaggtctccgtcggcctcgccggcaccaccaacaagacggtcaagctccccaagaacttcaccctcatgggtccggggccagggtacacctgcgggccggcgaccgtcgtcccgtccaccgtgtactggacgcccgaccaccggcgacggacgcaggcgctcatgacctggaccgtcacctgcacctactcgcagcagctggcgtccaagtacccgtcctgctgcgtctccttctcctccttctacaacgacaccatcgtgccctgcgccaagtgcgcctgcggctgcggccatggcggccacgccggaccgggaggctgcatcgagggggactccaagcgcgcgctgtcgccgggagtgaacacgccgcggaaggacgggcaggcgctgctgcagtgcacgccgcacatgtgccctgtccgtgtgcactggcatgtcaagctcaactacaaggactactggcgcgccaagatcgccatcaccaacttcaactacaggatgaactacacgcagtggacgctggtggcgcagcacccaaacctggacaatgtcaccgaggtcttcagcttccagtacaagccgctgctaccatacggcagcatcaatgacactggcatgttctacgggctcaagttctacaacgattttctgatggaggccgggccgttcgggaacgtgcagtcggaggtgctcatgcgcaaggacgccaggacattcaccttcagccagggatgggccttcccgcgcaagatctacttcaacggcgacgagtgcaagatgccgccgccggactcgtacccgtacctgcccaacgccgcgcccgtcgccgcctcgcagctggtcgtgtccgccgccgcctcagcgttcctactggcgctgctcctggtggcatga

SEQ ID NO: 127 - protein, 446 aa, Sorghum bicolor
  misc_feature (50)..(214): Pfam Name: Phytochel_synth Pfam Description: Phytochelatin synthetase-like
  misc_feature: Ceres Annot ID no. 8640603
  misc_feature: Bit score of 1129.8 for HMM based on sequences of Figure 3
  misc_feature: Functional Homolog Of SEQ ID NO. 117
MGLRDSSVLLAALSLALAYCSVSVVAYDPLDPRGNITIKWDVISWTPDGYVAMVTMSNYQMYRHIMSPGWTVGWSWAKKEVIWSIVGAQATEQGDCSKFKGGIPHCCKRTPAVVDLLPGVPYNQQIANCCKAGVVSAYGQDQAGSVSAFQVSVGLAGTTNKTVKLPKNFTLMGPGPGYTCGPATVVPSTVYWTPDHRRRTQALMTWTVTCTYSQQLASKYPSCCVSFSSFYNDTIVPCAKCACGCGHGGHAGPGGCIEGDSKRALSPGVNTPRKDGQALLQCTPHMCPVRVHWHVKLNYKDYWRAKIAITNFNYRMNYTQWTLVAQHPNLDNVTEVFSFQYKPLLPYGSINDTGMFYGLKFYNDFLMEAGPFGNVQSEVLMRKDARTFTFSQGWAFPRKIYFNGDECKMPPPDSYPYLPNAAPVAASQLVVSAAASAFLLALLLVA

SEQ ID NO: 128 - DNA, 1540 bp, Triticum aestivum
  misc_feature: Ceres Clone ID no. 829440
  misc_feature: Encodes the peptide sequence at SEQ ID NO. 129
gtattctaattttcgccctttaatcagctccatcgatggagctccccaactctatgctcctggctctgttcctcgcgatcacctgctccgtcgcagctgcgtatgatccgctggacccgacgggcaacattacgatcaagtgggacatccagtcatggacgccggacgggtacgtggcgatggtggcgatgaacaactaccagcagtaccgtcagatcatggcgccggggtggacgctggggtggtcgtgggccaagaaggaggtgatctggtccatcgtgggcgcgcaggccacggagcagggcgactgctccaagttcaagggcggcatcccgcactgctgcaagcacacgccctccgtcgtcgacctcctccccggcgtgccctacaaccagcagatcgccaactgctgccgcggcggcgtcgtctccgcctacggccaggacccggccggcgcgctctcggcgttccaggtctccgtggggctcgccggcaccaccaacaagacggtgaagctgcccaaaaacttcacgctcatggggcccgggctcggctacacctgcggccccgccaccgtcgtcccctccaccgtgtactggagcgccgaccaccgccgcaagacgcaggcgctgatgacctggacggtgacctgcacctactcgcagcagctggcgtcgaggtacccgacgtgctgcgtctccttctcctccttctacaacagcacgatcgtgccgtgcgcccggtgcgcgtgcggctgcggcgcgcacaagagcacgggcgggcgcggcggcaagagccacagcgacgggtgcatcgccggcgactccaagcgcgcgctgacccccggggtgaacacgcccaagaaggacggggcgcagctgctgcagtgcaccaaccacatgtgccccatccgcgtgcactggcacgtcaagctcaactacaaggactactggcgcgccaagatcgccgtcaccaacttcaactaccgcatgaactacacgcagtggacgctcgtcgctcagcacccgaacctcaacaacgtcacggaggtcttcagcttccagtacaagccgctcctgccatacggcaacatcaacgacaccggcatgttctacggcctcaagctctacaacgacctgctcatggaggccggcccgttcggcaacgtgcagtcggaggtgctcatgcgcaaggacgacgccaccttcaccttcggtcagggatgggctttcccgcgcaagatctacttcaacggcgatgagtgcaagatgccgccgccggactcgtacccgtacctgcccaactccgcgccgccgcgttcttccatcatcaccgctgctgcctcaacgtgcctggtgttgctgctcctgctcctggcggcgtgatctatatatcctggtgccacaattttcccattttgtaaaagacaacgcactgttgtaggtaggggcattttggtcttgcgagtattttaccttgtacaccaagatggtatgttcaagtgatttcatggtaatccttaagggaaacgttaccttcc

SEQ ID NO: 129 - protein, 449 aa, Triticum aestivum
  misc_feature (46)..(210): Pfam Name: Phytochel_synth Pfam Description: Phytochelatin synthetase-like
  misc_feature: Ceres Clone ID no. 829440
  misc_feature: Bit score of 1116.3 for HMM based on sequences of Figure 3
  misc_feature: Functional Homolog Of SEQ ID NO. 117
MELPNSMLLALFLAITCSVAAAYDPLDPTGNITIKWDIQSWTPDGYVAMVAMNNYQQYRQIMAPGWTLGWSWAKKEVIWSIVGAQATEQGDCSKFKGGIPHCCKHTPSVVDLLPGVPYNQQIANCCRGGVVSAYGQDPAGALSAFQVSVGLAGTTNKTVKLPKNFTLMGPGLGYTCGPATVVPSTVYWSADHRRKTQALMTWTVTCTYSQQLASRYPTCCVSFSSFYNSTIVPCARCACGCGAHKSTGGRGGKSHSDGCIAGDSKRALTPGVNTPKKDGAQLLQCTNHMCPIRVHWHVKLNYKDYWRAKIAVTNFNYRMNYTQWTLVAQHPNLNNVTEVFSFQYKPLLPYGNINDTGMFYGLKLYNDLLMEAGPFGNVQSEVLMRKDDATFTFGQGWAFPRKIYFNGDECKMPPPDSYPYLPNSAPPRSSIITAAASTCLVLLLLLLAA

SEQ ID NO: 130 - DNA, 1684 bp, Zea mays
  misc_feature: Ceres Clone ID no. 285169
  misc_feature: Encodes the peptide sequence at SEQ ID NO. 131
attcgccctgcctctagctgctgcttcttccaggatcggggatcggagcttgtgctgctactgctactataccagcgctagctagcagcagccgccggccggctcgcgcaactaaggaagggtcgacatgacgatggggctccgcgtccgcgactcctccgcgctgctggctctggccgtcgcgctcgcctgctgctccgttgcagtggtggcctacgaccccctggacccgaacggcaacatcaccatcaagtgggacgtgatctcgtggacgcccgacgggtacgtggcgatggtgacgatgagcaactaccagatgtaccggcacatcatggcgcccgggtggacgttggggtggtcgtgggccaagaaggaggtgatctggtccatcgtgggggcgcaggccacggagcagggggactgctccaagttcaagggcggcatcccgcactgctgcaagcgcaccccggccgtggtggacctcctcccgggggtgccctacaaccagcagatcgccaactgctgcaaggccggcgtggtgtcggcgtacgggcaggacccggcggggtccgtctccgcgttccaggtctccgtcggcctggccggtaccaccaacaagacggtgaagctgcccaggaacttcacgctcatggggcccgggctgggctacacctgcgggcccgccgccgtggtgccgtccaccgtgtactggacgcccgaccaccggcgccggacgcaggcgctcatgacgtggacggtgacctgcacctactcgcagcagctggcgtcccggtacccgtcctgctgcgtctccttctcctccttctacaacagcaccatcgtgccgtgcgcccggtgcgcgtgcggctgcggcggccacggcggccacgcgggtccgggcggctgcatcgagggggactccaagcgcgcgctgtcggccggggtgaacacgccgcgcaaggacggccaggcgctgctgcagtgcacgccgcacatgtgccccatccgggtgcactggcacgtcaagctcaactacaaggactactggcgcgccaagatcgccatcaccaactacaactacaggatgaactacacgcagtggacgctggtggcgcagcaccccaacctggacaacgtcaccgaggtcttcagcttccagtacaagccgctgcaaccatacgggagcatcaatgacactggcatgttctacgggctcaagttctacaacgactttctcatggaggccggcccgttcggcaacgtgcagtcggaggtgctcatgcgcaaggacgcaaggaccttcaccttcagcatgggctgggcgttcccgcgcaagatctacttcaacggcgacgagtgcaagatgccgccgccggactcctacccctacctgcccaacgccgcgcccgtcgtcgcctcgcagctggtcctgtccgccgccgcctcggcgttcctactgttgctgctcctggtggcatgaccgtgaccgaaccaagggcaaggcctccgttttgttttcccgtctcgtcccgtgggcagggagcagacttcagtaggcagggcattttatttggtttttttgccaaggattcaacacttgggttttcgtcagaggaaaactgtcgtgtatgtagtgtgagttgcaggtcgtcggatccccacgtacaagacaatctttggatcg

SEQ ID NO: 131 - protein, 450 aa, Zea mays
  misc_feature (53)..(217): Pfam Name: Phytochel_synth Pfam Description: Phytochelatin synthetase-like
  misc_feature: Ceres Clone ID no. 285169
  misc_feature: Bit score of 1123.0 for HMM based on sequences of Figure 3
  misc_feature: Functional Homolog Of SEQ ID NO. 117
MTMGLRVRDSSALLALAVALACCSVAVVAYDPLDPNGNITIKWDVISWTPDGYVAMVTMSNYQMYRHIMAPGWTLGWSWAKKEVIWSIVGAQATEQGDCSKFKGGIPHCCKRTPAVVDLLPGVPYNQQIANCCKAGVVSAYGQDPAGSVSAFQVSVGLAGTTNKTVKLPRNFTLMGPGLGYTCGPAAVVPSTVYWTPDHRRRTQALMTWTVTCTYSQQLASRYPSCCVSFSSFYNSTIVPCARCACGCGGHGGHAGPGGCIEGDSKRALSAGVNTPRKDGQALLQCTPHMCPIRVHWHVKLNYKDYWRAKIAITNYNYRMNYTQWTLVAQHPNLDNVTEVFSFQYKPLQPYGSINDTGMFYGLKFYNDFLMEAGPFGNVQSEVLMRKDARTFTFSMGWAFPRKIYFNGDECKMPPPDSYPYLPNAAPVVASQLVLSAAASAFLLLLLLVA

SEQ ID NO: 132 - protein, 471 aa, Picea sitchensis
  misc_feature (69)..(234): Pfam Name: Phytochel_synth Pfam Description: Phytochelatin synthetase-like
  misc_feature: Public GI ID no. 116790012
  misc_feature: Bit score of 1051.6 for HMM based on sequences of Figure 3
  misc_feature: Functional Homolog Of SEQ ID NO. 117
MMEKRELNSSRGQRCMQNCHILNKNAAGFFLALTILAIAFSPAGAYDPLDPNGNITIKWDIVSWTADGYVAAVTMHNFQQYRHIPSPPGWTLGWNWAKKEVIWAVVGGQTTEQGDCSKWKAGSPHCCKKDPTVVDLLPGVPYNQQFTNCCKGGALASWAQDPPNSVASFQVSVGNSGTTNKTVKLPKNFTLKAPGPGYTCGPAKIVKSSLFFSTDRRRTTQALMTWNVTCTYSQFLAQKSSTCCVSLSSFYNDTITPCPTCACACRNNVTQPSCVHSDSPVLKLPGPTNPITNSLQPPLLQCTRHMCPVRVHWHVKLNYKDYWRVKITVTNFNYRMNYTDWTLVAQHPNFDNVTQVFSFNYKPLTPYGSINDTAMFWGQKYYNDLLMQAGPMGSVQSELLLRKDKQTFTFKQGWAFPRRLYFNGDQCVMPSPDAYPWLPSTAHPAPAPPSLFAFILPLALALAIVPSLFLP

SEQ ID NO: 133 - protein, 462 aa, Vitis vinifera
  misc_feature (74)..(238): Pfam Name: Phytochel_synth Pfam Description: Phytochelatin synthetase-like
  misc_feature: Public GI ID no. 157356290
  misc_feature: Bit score of 1096.4 for HMM based on sequences of Figure 3
  misc_feature: Functional Homolog Of SEQ ID NO. 117
MEFNNSANPVHHTPFEAKDRCQWQDCYSFRELKHIFSVVIFFMMVSHAIAYDPLDPTGNITIKWDVVSWTPDGYVALVTMNNFQMYRHIMTPGWTLSWSWAKKEVIWSMVGAQTTEQGDCSKFKANIPHCCEKTPTVVDLLPGVPYNQQIANCCKAGVVAAWGQDPAGSVSSFQVSVGQAGTSNKTVKLPKNFTLLGPGPGYTCGPAKIVPSTIYLTPDHRRKTQAMMTWNVTCTYSQFLASKNPTCCVSFSSFYNDTMTPCPSCACGCRNKNMCISSDSKKLKALHNPKRSNTPLLQCTHHMCPIRVHWHVKLNYKDYWRVKIAITNFNYRMNYTQWTLVAQHPNLNNVTQVFSFDYKPLVPYESINDTGMFYGMKFYNDLLVEAGQHGNVQSEVLLQKNKDTFTFKQGWAFPRKVYFNGDECKLPPPDTYPFLPNSAHANPFAFWTMAAPLLLMILYTIW

SEQ ID NO: 134 - DNA, 1296 bp, Populus balsamifera subsp. trichocarpa
  misc_feature: Ceres Annot ID no. 1450186
  misc_feature: Encodes the peptide sequence at SEQ ID NO. 135
atgagatttctcttctttattgtcttgtttcttgtgctcttttcttgttcaggtgcatatgatcctttggatccaactggaaatgtaacaataaaatgggatattatgtcttggacgacagatggctatattgcaattgtaacattgttcaacttccaaacgttccggcacttcatgaaacctggatggaccataggctggacatgggcaaagaaagaaatcatatggtccatcaatggtgctcaagcggttgaacaaggcgactgctccaagttcaaagcaaacatacctcattcctgcaagagaagccctgcagttgtggacttgcttcccggtgctcctttcaaccagcaattcggtaattgttgcaaaggcggagtagtggcagcatggggcaaagatccttcagctgctgtctctcaatttcagattactgttggattatccggtacttcaaataaaacagtgaaacttccaaagagcttcaccttgttaggtccaggaccaggatacacttgtggccctccaaagatggtgccttccaccaagtttcttactcctgatggtctgcgaagaactcaggccctgttgacttggaatgttacctgcacttactcacaattcatggcaagaaaaaacccaagttgctgtgtatctctttcatctttctacaatcagatactcactccctgcccaacttgtgcgtgcggttgccaaaacaatgacacttgtgtcaatggcgattccagaattcttcaattgccggtaggaaacacaacccggaaagataatagctctcttctgcaatgcacacaccatatgtgcccggttcgagtgcactggcatgtgaaggtgaactataaggagtactggcgtgtcaagattgcgatcacaaatttcaactacatgaagaactactcgacttggaccctcgttgtacagcatccgaatctcaacaacgtaacgcaagtttttagcttcgagtacaaacctctcattgcctatgactcgataaatgacacagggatgttctatggcatgaaggactacaatgacgtattaatggaagcagggccacttggaaatcttcaatctgaggtgcttcttcagaaggaccagaacactttcaccttcaagcagggatgggcatttccacggaaagtctacttcaatggcgatgagtgcatggtacccccgccagatacatacccatttctgcccaattctgctcatggatccccacacttctccatgttgatttctacgttgattttcctgttcgtgtatatctggtaa

SEQ ID NO: 135 - protein, 431 aa, Populus balsamifera subsp. trichocarpa
  misc_feature (43)..(207): Pfam Name: Phytochel_synth Pfam Description: Phytochelatin synthetase-like
  misc_feature: Ceres Annot ID no. 1450186
  misc_feature: Bit score of 992.2 for HMM based on sequences of Figure 3
  misc_feature: Functional Homolog Of SEQ ID NO. 117
MRFLFFIVLFLVLFSCSGAYDPLDPTGNVTIKWDIMSWTTDGYIAIVTLFNFQTFRHFMKPGWTIGWTWAKKEIIWSINGAQAVEQGDCSKFKANIPHSCKRSPAVVDLLPGAPFNQQFGNCCKGGVVAAWGKDPSAAVSQFQITVGLSGTSNKTVKLPKSFTLLGPGPGYTCGPPKMVPSTKFLTPDGLRRTQALLTWNVTCTYSQFMARKNPSCCVSLSSFYNQILTPCPTCACGCQNNDTCVNGDSRILQLPVGNTTRKDNSSLLQCTHHMCPVRVHWHVKVNYKEYWRVKIAITNFNYMKNYSTWTLVVQHPNLNNVTQVFSFEYKPLIAYDSINDTGMFYGMKDYNDVLMEAGPLGNLQSEVLLQKDQNTFTFKQGWAFPRKVYFNGDECMVPPPDTYPFLPNSAHGSPHFSMLISTLIFLFVYIW

SEQ ID NO: 136 - DNA, 1576 bp, Panicum virgatum
  misc_feature: Ceres Clone ID no. 1804732
  misc_feature: Encodes the peptide sequence at SEQ ID NO. 137
aaccaaatgcggcgtcctgctggtgtggtctagcgagccgcgtggtgcttgggctccgttcgttccgttgaggctcgcgtcgatctagcgatggagccccggtgctccgtgatggtcctggccctcgccgccgcgctatccgtcgcagtggcttacgacccgctggacccgaacgggaacattaccatcaaatgggacatcatgtcgtggacgcctgacggctatgtcgcggtggtgacgatcaacaacttccagatgtaccggcagatcatggcgccggggtggacggtggggtggacgtgggccaagaaggaggtgatctggtccatggtgggcgcgcaggccacggagcagggcgactgctcccgcttcaagggcaacatcccgcactgctgcaagcgcacccccgccgtcgtggacctgctgcccggcgtgccctacaaccagcagatcgccaactgctgccggggcggcgtcatcagcgcctacggccaggaccccggcgccgccgtcgccgcgttccaggtcagcgtcggccaggccggcaccaccaaccgcaccgtcaaggtgcccaagaacttcacgctgctcggccccggccctgggtacacctgcggccccgccaaggtcgtcccctccaccgtcttcctcacgcccgaccgccgccgcaagacccaggcactcatgacgtggaacgtgacgtgcacctactcgcagtacctggcgtccaagtacccgtcctgctgcgtctctttctcctccttctacaacgacaccatcgtgccctgcgccaagtgcgcctgcggctgcgagcacaagacctgcgtccagggcgactcgaagcggccgctggcggtgacggggaagcacacgcacgcggcggcgacgcgcgggcaccgggacaaggaggcgccgctgctgcagtgcacgacgcacatgtgccccgtgcgcgtgcactggcacgtcaagctcaactacaaggagtactggcgcgccaagatcgccatcaccaacttcaactaccgcatgaactacacgcagtggacgctcgtcgcgcagcaccccaacctcgacaacatcaccgaggtcttcagcttcgactacaagcccgtcgttgcctacggatccatcaatgacacggccatgttctacgggctcaagtacttcaacgaccacctcatgcaggcggggccgtacgggaacgtgcagtcggaggtgctcatgcgcaaggacgccagcaccttcaccttcaggcagggctgggcgttcccgcgcaaggtctacttcaacggcgatgagtgccagatgccgccgccggacgcctacccctacctgcccaacgccgccctgccggcccccgtggcgtcgctgggcgccgcggtggtggccgtcgtggcgttcctggtgctggtcgtggtatgagacatgagaaaaacacaggagagcgatcgacctagcgctagaatcggccggcatggggagaaaaagacgacgatgttttgctctgtagatacagtcgacgttttgacttttgagtttcaggattggtttggatatctaagtttttttttctttc

SEQ ID NO: 137 - protein, 443 aa, Panicum virgatum
  misc_feature (45)..(209): Pfam Name: Phytochel_synth Pfam Description: Phytochelatin synthetase-like
  misc_feature: Ceres Clone ID no. 1804732
  misc_feature: Bit score of 1050.0 for HMM based on sequences of Figure 3
  misc_feature: Functional Homolog Of SEQ ID NO. 117
MEPRCSVMVLALAAALSVAVAYDPLDPNGNITIKWDIMSWTPDGYVAVVTINNFQMYRQIMAPGWTVGWTWAKKEVIWSMVGAQATEQGDCSRFKGNIPHCCKRTPAVVDLLPGVPYNQQIANCCRGGVISAYGQDPGAAVAAFQVSVGQAGTTNRTVKVPKNFTLLGPGPGYTCGPAKVVPSTVFLTPDRRRKTQALMTWNVTCTYSQYLASKYPSCCVSFSSFYNDTIVPCAKCACGCEHKTCVQGDSKRPLAVTGKHTHAAATRGHRDKEAPLLQCTTHMCPVRVHWHVKLNYKEYWRAKIAITNFNYRMNYTQWTLVAQHPNLDNITEVFSFDYKPVVAYGSINDTAMFYGLKYFNDHLMQAGPYGNVQSEVLMRKDASTFTFRQGWAFPRKVYFNGDECQMPPPDAYPYLPNAALPAPVASLGAAVVAVVAFLVLVVV

SEQ ID NO: 138 - DNA, 1566 bp, Panicum virgatum
  misc_feature: Ceres Clone ID no. 1781794
  misc_feature: Encodes the peptide sequence at SEQ ID NO. 139
caggaacttgtcccaccagctagcagtcagtagcggtgttcttgcagaggcggccggccggctcgacgtgcgtcgacgatggggctccgccgcgactccgccgccgcgctggtggctctggtgctcgcggtcacctgctgctccgttgcagtagtggcctacgatcccctggacccgaacggcaacatcaccatcaagtgggacgtcatctcctggacgcccgacggctacgtggcgatggtgacgatgagcaactaccagatgtaccggcacatcatggcgcccgggtggacggtggggtggtcgtgggccaagaaagaggtgatctggtccatcgtgggcgcgcaggccacggagcagggcgactgctccaagttcaaggccggcatcccgcactgctgcaagcgcacccccgccgtggtggacctcctcccgggcgtaccctacaaccagcagatcgccaactgctgcaaggccggcgtcgtcgccgcctacggccaggaccccaccgccgccgtctccgccttccaggtctccgtcggcctcgccggcaccaccaacaagaccgtcaagctccccaccaacttcaccctccagggccccggcccgggctacacctgcggccccgcccgcgtcgtcccctccaccgtctacctcacccccgaccgccgccgccgcacgcaggcgctcatgacctggaccgtcacctgcacctactcccagcagctcgcctcccggtacccctcctgctgcgtctccttctcctccttctacaacagcaccatcgtgccctgcgcccactgcgcctgcggctgcggccatggcggccacggcggcgccggctgcatcgccggcgactccaagcgcgcgctctcccccggcgtcaacacgccgcgcagggacgggcagccgctgctgcagtgcacgccgcacatgtgcccggtgcgcgtccactggcacgtcaagctcaactacaaagactactggcgcgccaagatcgccatcaccaacttcaactaccggatcaactacacgcagtggacgctggtggcgcagcaccccaacctggacaacgtcaccgaggtcttcagcttccagtacaggccgctgctgccctacggcgccatcaacgacaccggcatgttctacgggctcaaattctacaacgacctgctcatggaggccgggcctttcggcaacgtgcagtccgaggtgctcatgcgcaaggacgccagaaccttcaccttcagccagggatgggccttcccaaggaagatctacttcaacggcgacgagtgcaagatgccgccgccggactcctacccctacctgcccaacaggtccgcccgggttgcggcaccgtcggtgatcgcctcggcattcctgctggcgctgctgctcctgctggcgccgtgattgatagggagcagcagagtgtgttgttacctgtgcagcggtggtttcgtcatgtaaacataacgcggtgggatctccaattactttctagacagcctgagaacaaatgatagtaatacatagtagagcacaagcctttttctgcggttt

SEQ ID NO: 139 - protein, 445 aa, Panicum virgatum
  misc_feature (51)..(215): Pfam Name: Phytochel_synth Pfam Description: Phytochelatin synthetase-like
  misc_feature: Ceres Clone ID no. 1781794
  misc_feature: Bit score of 1098.5 for HMM based on sequences of Figure 3
  misc_feature: Functional Homolog Of SEQ ID NO. 117
MGLRRDSAAALVALVLAVTCCSVAVVAYDPLDPNGNITIKWDVISWTPDGYVAMVTMSNYQMYRHIMAPGWTVGWSWAKKEVIWSIVGAQATEQGDCSKFKAGIPHCCKRTPAVVDLLPGVPYNQQIANCCKAGVVAAYGQDPTAAVSAFQVSVGLAGTTNKTVKLPTNFTLQGPGPGYTCGPARVVPSTVYLTPDRRRRTQALMTWTVTCTYSQQLASRYPSCCVSFSSFYNSTIVPCAHCACGCGHGGHGGAGCIAGDSKRALSPGVNTPRRDGQPLLQCTPHMCPVRVHWHVKLNYKDYWRAKIAITNFNYRINYTQWTLVAQHPNLDNVTEVFSFQYRPLLPYGAINDTGMFYGLKFYNDLLMEAGPFGNVQSEVLMRKDARTFTFSQGWAFPRKIYFNGDECKMPPPDSYPYLPNRSARVAAPSVIASAFLLALLLLLAP

SEQ ID NO: 140 - DNA, 1341 bp, Sorghum bicolor
  misc_feature: Ceres Annot ID no. 8656625
  misc_feature: Encodes the peptide sequence at SEQ ID NO. 141
atggagccccgatgcttcgtgctggtcctggccctcgccgccgcgctctccgtcgcagtggcttacgacccgttggacccgaacgggaacattaccatcaaatgggacatcatgtcgtggacgcctgacggctatgtcgcggtggtgaccatcaacaacttccagatgtaccggcagatcatggcgccggggtggacggtggggtggacgtgggcgaagcgtgaggtgatctggtccatggtgggcgcgcaggcgacggagcagggcgactgctcccgcttcaaggccaacatcccgcactgctgcaagcgcacgcccaccgtcgtcgacctgctccccggcgtgccctacaaccagcagatcgccaactgctgccgcggcggcgtcatcagcgcctacggccaggacccggcctccgccgtcgccgcgttccaggtcagcgtcggccaggccggcaccaccaaccgcaccgtcaaggttcccaagaacttcacgctgcttgggccagggccagggtacacctgcggccccggcaagattgttccctccaccgtcttcctcacgcccgaccgccggcgcaagacacaagccctcatgacgtggaacgtgacgtgcacctactcgcagcacctggcgtccaagtacccgtcctgctgcgtctccttctcctccttctacaacgacaccatcgtgccctgcgccaagtgcgcctgcggctgcgagcacaagacctgcgtccagggcgactcgaagcggctggcggtgacggggaagcacgagcacgcgcacgcggcggcggcgcgcgggcacagggacaaggaggcgccgctgctgcagtgcacgacgcacatgtgccccgtgcgcgtgcactggcacgtcaagctcaactacaaggagtactggcgggccaagatcgccatcaccaacttcaactaccacatgaactacacgcagtggacgctcgtcgcgcagcaccccaacctcgacaacatcaccgaggtcttcagcttcgactacaagcctgtcgtcgcctacggatccatcaatgacacggcgatgttctacgggctcaagtacttcaacgaccacctgatgcaggcggggccgtacgggaacgtgcagtcggaggtgctgatgcgcaaggacgccagcaccttcaccttcaggcagggctgggcgttcccgcgcaaggtctacttcaacggcgacgagtgccagatgccgccgccggacgagtatccctacttgcccaactcagccctgccggcagccgcggcgtcgtcgtcgctgggcgctgcggtagcggccgtcgtggtgctcttggtgatgatcgtggcatga

SEQ ID NO: 141 - protein, 446 aa, Sorghum bicolor
  misc_feature (45)..(209): Pfam Name: Phytochel_synth Pfam Description: Phytochelatin synthetase-like
  misc_feature: Ceres Annot ID no. 8656625
  misc_feature: Bit score of 1042.9 for HMM based on sequences of Figure 3
  misc_feature: Functional Homolog Of SEQ ID NO. 117
MEPRCFVLVLALAAALSVAVAYDPLDPNGNITIKWDIMSWTPDGYVAVVTINNFQMYRQIMAPGWTVGWTWAKREVIWSMVGAQATEQGDCSRFKANIPHCCKRTPTVVDLLPGVPYNQQIANCCRGGVISAYGQDPASAVAAFQVSVGQAGTTNRTVKVPKNFTLLGPGPGYTCGPGKIVPSTVFLTPDRRRKTQALMTWNVTCTYSQHLASKYPSCCVSFSSFYNDTIVPCAKCACGCEHKTCVQGDSKRLAVTGKHEHAHAAAARGHRDKEAPLLQCTTHMCPVRVHWHVKLNYKEYWRAKIAITNFNYHMNYTQWTLVAQHPNLDNITEVFSFDYKPVVAYGSINDTAMFYGLKYFNDHLMQAGPYGNVQSEVLMRKDASTFTFRQGWAFPRKVYFNGDECQMPPPDEYPYLPNSALPAAAASSSLGAAVAAVVVLLVMIVA

SEQ ID NO: 142 - protein, 447 aa, Zea mays
  misc_feature (47)..(211): Pfam Name: Phytochel_synth Pfam Description: Phytochelatin synthetase-like
  misc_feature: Public GI ID no. 162462515
  misc_feature: Bit score of 1036.7 for HMM based on sequences of Figure 3
  misc_feature: Functional Homolog Of SEQ ID NO. 117
MEPRRSVLLLALAVAAALSVAVAYDPLDPNGNITIKWDIMSWTPDGYVAVVTINNFQTYRQITAPGWTVGWTWAKREVIWSMVGAQATEQGDCSRFKANIPHCCKRTPAVVDLLPGVPYNQQIANCCRGGVVSAYGQDPATAVAAFQVSVGQAGTTNRTVKVPKNFTLLGPGPGYTCGPGKVVPSTVFLTPDRRRKTQALMTWNVTCTYSQHLASKYPSCCVSFSSFYNDTIVPCAKCACGCEHKTCVQGDSKRLAVTGKHAHTAAAVRGQHRDKEAPLLQCTTHMCPVRVHWHVKLNYKEYWRAKIAITNFNYHMNYTQWTLVAQHPNLDNITEVFSFGYKPVVSYGSINDTAMFYGLKYFNDHLMQAGPYGNVQSEVLMRKDASTFTFRQGWAFPRKVYFNGDECQMPPPDAYPYLPNSAPPTAAASLGGAAAAAVVVLLGMIVA

SEQ ID NO: 143 - DNA, 1529 bp, Sorghum bicolor
  misc_feature: Ceres Clone ID no. 570485
  misc_feature: Encodes the peptide sequence at SEQ ID NO. 144
atctgcgccttctggtgagagtacgtgtgttggttgttcttgcaggcacttgcacgcgtggtcaccatggagctgccccacgccgcgctcgcgctgatcgtcgccgcggccgccacgctctccgtcgcagtggcctacgacccgctggatcccaacgggaacatcaccatcaaatgggacgttctctcgtggacgccagacggatacgtcgcgacggtgacgatcaacaacttccagacgtaccggcagatcatggcgccggggtggacggtggggtggacgtgggcgaagcgggaggtgatctggtccatggtgggcgcgcaggccacggagcagggcgactgctccaagttcaaggccaacctcccgcactcgtgcaagcgcacccccgccgtcgtcgacctgctcccgggcgtgccctacaaccagcagatcgccaactgctgccgcggcggcgtcgtctccgcctacggccaggacccgtccggcgccgtgtcctccttccaggtcagcgtcggccaggccggcaccaccaaccgcaccgtcaaggtccccaagaacttcaccctcctcggccccggcccaggctacacctgcggccccgccaaggtcgtcccctccaccgtcttcctcaccgccgaccaccgccgcaagacccaggccctcatgacgtggaacgtgacgtgcacctactcgcagcacctggcgtccaagtacccgacctgctgcgtctccttctcctccttctacaacgacaccatcgtgccctgcgccaagtgcgcgtgcggctgcgagcacaagacctgcgcccgcagcgagcgggactcgaagcggctcatgtcggcgtcggggaagagcagcgcgcacgcggtcaccgcggtgcgcgggcacgtgaaccggcagagcgcggcgccgctgctgcagtgcacgacccacatgtgccccgtgcgcgtccactggcacgtcaagctcaactaccacgactactggcgcgccaaggtgaccgtcaccaacttcaactaccgcaccaactacaccggctggacgctcgtcgcccagcaccccaacctcgacaacatcaccgaggtcttcagcttcgactacaagcccgtcgtctcctacggctccatcaatgatacggcgctgttctacgggatgaagttcttcaacgaccagctcatggaggcggggccgtacgggaacgtgcagtcggaggtgctgatgcgcaaggacgccagcacattcacgttcaggcaggggtgggcgttcccgcggaagatctacttcaacggcgacgagtgccggatgccgccgccggactcctacccttacctgcccaactccgcgccggcgtcgctcgtgagctccgcctccgtcgtcgtcgccttcttggttctactcatggcatgagcgtcggaggcggccatgatgttttgcctgtagatcataggagaacgttttgggcttcaaggttgagatcggtggtgttttaatctggatataattaaacgcaagtttttccccattac

SEQ ID NO: 144 - protein, 447 aa, Sorghum bicolor
  misc_feature (47)..(211): Pfam Name: Phytochel_synth Pfam Description: Phytochelatin synthetase-like
  misc_feature: Ceres Clone ID no. 570485
  misc_feature: Bit score of 1016.9 for HMM based on sequences of Figure 3
  misc_feature: Functional Homolog Of SEQ ID NO. 117
MELPHAALALIVAAAATLSVAVAYDPLDPNGNITIKWDVLSWTPDGYVATVTINNFQTYRQIMAPGWTVGWTWAKREVIWSMVGAQATEQGDCSKFKANLPHSCKRTPAVVDLLPGVPYNQQIANCCRGGVVSAYGQDPSGAVSSFQVSVGQAGTTNRTVKVPKNFTLLGPGPGYTCGPAKVVPSTVFLTADHRRKTQALMTWNVTCTYSQHLASKYPTCCVSFSSFYNDTIVPCAKCACGCEHKTCARSERDSKRLMSASGKSSAHAVTAVRGHVNRQSAAPLLQCTTHMCPVRVHWHVKLNYHDYWRAKVTVTNFNYRTNYTGWTLVAQHPNLDNITEVFSFDYKPVVSYGSINDTALFYGMKFFNDQLMEAGPYGNVQSEVLMRKDASTFTFRQGWAFPRKIYFNGDECRMPPPDSYPYLPNSAPASLVSSASVVVAFLVLLMA

SEQ ID NO: 145 - protein, 441 aa, Oryza sativa subsp. japonica
  misc_feature (46)..(210): Pfam Name: Phytochel_synth Pfam Description: Phytochelatin synthetase-like
  misc_feature: Public GI ID no. 125586664
  misc_feature: Bit score of 1075.6 for HMM based on sequences of Figure 3
  misc_feature: Functional Homolog Of SEQ ID NO. 117
MELHRCSLLALLLAVTCSVAVAYDPLDPKGNITIKWDVISWTPDGYVAMVTMSNYQMYRQILAPGWTVGWSWAKKEVIWSIVGAQATEQGDCSKFKGGIPHSCKRTPAIVDLLPGVPYNQQIANCCKAGVVSAYGQDPAGSVSAFQVSVGLAGTTNKTVKLPTNFTLAGPGPGYTCGPATIVPSTVYLTPDRRRRTQALMTWTVTCTYSQQLASRYPTCCVSFSSFYNSTIVPCASRRNSGGGGGHSGGTECIMGDSKRALSAGVNTPRKDGAPLLQCTSHMCPIRVHWHVKLNYKDYWRAKIAITNFNYRMNYTQWTLVAQHPNLNNVTEVFSFQYKPLLPYGNINDTGMFYGLKFYNDLLMEAGPFGNVQSEVLMRKDYNTFTFSQGWAFPRKIYFNGDECKMPPPDSYPYLPNSAPIGPPRSVAAAASAILVVLLLVA

SEQ ID NO: 146 - protein, 458 aa, Picea sitchensis
  misc_feature (63)..(227): Pfam Name: Phytochel_synth Pfam Description: Phytochelatin synthetase-like
  misc_feature: Public GI ID no. 116788824
  misc_feature: Bit score of 967.3 for HMM based on sequences of Figure 3
  misc_feature: Functional Homolog Of SEQ ID NO. 117
MGFSDTNTNMRVQSRWCFTSGILLGLTLIIAFAFSPTGAYDPLDPNGNITIKWDIMSWTPDGYLAVVTINNFQQYRHIQSPGWTLGWTWAKKEVIWSMVGAQTTEQGDCSKYKGNIPHCCNKNPTVVDLLPGTPYNQQIANCCKGGVIASWAQDPVNAVSAFQVSVGNAGTTNTTVRLPKNFTLKAPGPGYTCGPAKKVRASKFLTTDGRRVTQALMTWNITCTYSQFLAQKTPSCCVSLTSFYNDTIVPCPACTCGCQNNITQPGTCVESDSPVLPSLLNTSPKNLAPLIQCTPHMCPIKIHWHVKLNYKEYWRVKVTITNFNYRMNYTQWNIVVQHPNFDNVTQLFSFNYKPLTPYGKINDTAMLWGVKYYNDMLMQAGEMGNVQSELLFQKDKQTFTFKQGWGFPRRVYFNGDDCVLPPPDAYPWLPNGSPSPRVGKVFLLIVSLVVSACLLAFL

SEQ ID NO: 147 - protein, 468 aa, Oryza sativa subsp. japonica
  misc_feature (46)..(210): Pfam Name: Phytochel_synth Pfam Description: Phytochelatin synthetase-like
  misc_feature: Public GI ID no. 115453531
  misc_feature: Bit score of 1101.6 for HMM based on sequences of Figure 3
  misc_feature: Functional Homolog Of SEQ ID NO. 117
MELHRCSLLALLLAVTCSVAVAYDPLDPKGNITIKWDVISWTPDGYVAMVTMSNYQMYRQILAPGWTVGWSWAKKEVIWSIVGAQATEQGDCSKFKGGIPHSCKRTPAIVDLLPGVPYNQQIANCCKAGVVSAYGQDPAGSVSAFQVSVGLAGTTNKTVKLPTNFTLAGPGPGYTCGPATIVPSTVYLTPDRRRRTQALMTWTVTCTYSQQLASRYPTCCVSFSSFYNSTIVPCARCACGCGHDGYRGNGGGGKNARAGDGRSRRNSGGGGGHSGGTECIMGDSKRALSAGVNTPRKDGAPLLQCTSHMCPIRVHWHVKLNYKDYWRAKIAITNFNYRMNYTQWTLVAQHPNLNNVTEVFSFQYKPLLPYGNINDTGMFYGLKFYNDLLMEAGPFGNVQSEVLMRKDYNTFTFSQGWAFPRKIYFNGDECKMPPPDSYPYLPNSAPIGPPRSVAAAASAILVVLLLVA

SEQ ID NO: 148 - DNA, 1715 bp, Arabidopsis thaliana
  misc_feature: Ceres Clone ID no. 17250
  misc_feature: Encodes the peptide sequence at SEQ ID NO. 149
aaaaaatgtctcattgcttctctcgttctaaaaaaaatcttgctgctatctctctataagtccactcctccttcaagcaaagcaccttcctcttctttttgctcctctgagattggtttaagattaaaccagacccatctaagggatctggaacaagcttcgtctctggttccactctgatcatcagagtattaaaaatggagtctttcttctccagatccacctccatcgtctccaaattgagtttcttggccttatggatcgtcttcttgatttcttcatcttcttttacttcgacagaagcatatgatgcgcttgatccagaaggcaacattacaattaaatgggatgttatgagctggactcctgatggctatgttgccgtggttacgatgttcaacttccagaaatacagacacattcaatctccaggatggacattaggttggaaatgggcaaagaaggaagttatatggagtatggttggagcacaaacaactgaacaaggtgattgttcaaagtacaaaggaaacataccacattgttgtaagaaggatccaacagttgtagacttgcttccagggactccttataatcagcagattgctaattgctgcaagggtggtgttatgaactcatgggttcaagaccctgccactgcggctagctccttccagattagtgttggtgctgctggaaccacaaacaaaaccgttagggtcccaagaaacttcactctcatgggacctggtccaggttacacttgtggtccagcaaagattgtcagaccaacaaaatttgtcacgactgacacacgcagaaccactcaagctatgatgacatggaacattacgtgcacatactcgcagttccttgctcaaagaactccaacttgctgtgtttctttatcttctttctacaatgaaaccattgttggatgtccaacttgtgcttgcggatgtcaaaacaacagaacagaatccggtgcctgcctcgacccggacacaccacacttagcctcggttgtgtcaccaccaacaaagaaaggaacggttttaccaccattagtgcaatgcacgagacacatgtgcccgatcagagtgcattggcatgtaaagcagaactacaaagagtattggcgtgtgaagatcacaatcacaaacttcaactatcgcttgaactacacacaatggaaccttgttgctcaacatccaaatctcgacaacatcactcaaatcttcagcttcaactacaaatctcttactccttacgctggactaaacgatacggcgatgttatggggagtgaagttctacaacgatttcttatcagaagcaggtcctcttgggaatgttcaatcagagattttgttccgtaaagaccaatcaaccttcacattcgagaaaggttgggcttttccacgaaggatttactttaatggagacaattgcgtcatgcctcctccagactcttacccttttcttcccaacggtggttcccggtcacaattctcattcgtcgccgccgtgctcctccctcttcttgtctttttcttcttctctgcctaatctcggatttacggttttgccactggtttgcttagggttacggtggagtggtataaacgtttatttatgattcttttgtgtcccacaaaaattataatcttttgatactttttaaaaatataaatagttttcaacttccttgttttt

SEQ ID NO: 149 - protein, 456 aa, Arabidopsis thaliana
  misc_feature (60)..(224): Pfam Name: Phytochel_synth Pfam Description: Phytochelatin synthetase-like
  misc_feature: Ceres Clone ID no. 17250
  misc_feature: Bit score of 954.5 for HMM based on sequences of Figure 3
  misc_feature: Functional Homolog Of SEQ ID NO. 117
MESFFSRSTSIVSKLSFLALWIVFLISSSSFTSTEAYDALDPEGNITIKWDVMSWTPDGYVAVVTMFNFQKYRHIQSPGWTLGWKWAKKEVIWSMVGAQTTEQGDCSKYKGNIPHCCKKDPTVVDLLPGTPYNQQIANCCKGGVMNSWVQDPATAASSFQISVGAAGTTNKTVRVPRNFTLMGPGPGYTCGPAKIVRPTKFVTTDTRRTTQAMMTWNITCTYSQFLAQRTPTCCVSLSSFYNETIVGCPTCACGCQNNRTESGACLDPDTPHLASVVSPPTKKGTVLPPLVQCTRHMCPIRVHWHVKQNYKEYWRVKITITNFNYRLNYTQWNLVAQHPNLDNITQIFSFNYKSLTPYAGLNDTAMLWGVKFYNDFLSEAGPLGNVQSEILFRKDQSTFTFEKGWAFPRRIYFNGDNCVMPPPDSYPFLPNGGSRSQFSFVAAVLLPLLVFFFFSA

SEQ ID NO: 150 - DNA, 1371 bp, Arabidopsis thaliana
  misc_feature: Ceres Annot ID no. 1363625
  misc_feature: Encodes the peptide sequence at SEQ ID NO. 151
atggagtctttcttctccagatccacctccatcgtctccaaattgagtttcttggccttatggatcgtcttcttgatttcttcatcttcttttacttcgacagaagcatatgatgcgcttgatccagaaggcaacattacaatgaaatgggatgttatgagctggactcctgatggctatgttgccgtggttacgatgttcaacttccagaaatacagacacattcaatctccaggatggacattaggttggaaatgggcaaagaaggaagttatatggagtatggttggagcacaaacaactgaacaaggtgattgttcaaagtacaaaggaaacataccacattgttgtaagaaggatccaacagttgtagacttgcttccagggactccttataatcagcagattgctaattgctgcaagggtggtgttatgaactcatgggttcaagaccctgccactgcggctagctccttccagattagtgttggtgctgctggaaccacaaacaaaaccgttagggtcccaagaaacttcactctcatgggacctggtccaggttacacttgtggtccagcaaagattgtcagaccaacaaaatttgtcacgactgacacacgcagaaccactcaagctatgatgacatggaacattacgtgcacatactcgcagttccttgctcaaagaactccaacttgctgtgtttctttatcttctttctacaatgaaaccattgttggatgtccaacttgtgcttgcggatgtcaaaacaacagaacagaatccggtgcctgcctcgacccggacacaccacacttagcctcggttgtgtcaccaccaacaaagaaaggaacggttttaccaccattagtgcaatgcacgagacacatgtgcccgatcagagtgcattggcatgtaaagcagaactacaaagagtattggcgtgtgaagatcacaatcacaaacttcaactatcgcttgaactacacacaatggaaccttgttgctcaacatccaaatctcgacaacatcactcaaatcttcagcttcaactacaaatctcttactccttacgctggactaaacgatacggcgatgttatggggagtgaagttctacaacgatttcttatcagaagcaggtcctcttgggaatgttcaatcagagattttgttccgtaaagaccaatcaaccttcacattcgagaaaggttgggcttttccacgaaggatttactttaatggagacaattgcgtcatgcctcctccagactcttacccttttcttcccaacggtggttcccggtcacaattctcattcgtcgccgccgtgctcctccctcttcttgtctttttcttcttctctgcctaa

SEQ ID NO: 151 - protein, 456 aa, Arabidopsis thaliana
  misc_feature (60)..(224): Pfam Name: Phytochel_synth Pfam Description: Phytochelatin synthetase-like
  misc_feature: Ceres Annot ID no. 1363625
  misc_feature: Bit score of 951.5 for HMM based on sequences of Figure 3
  misc_feature: Functional Homolog Of SEQ ID NO. 117
MESFFSRSTSIVSKLSFLALWIVFLISSSSFTSTEAYDALDPEGNITMKWDVMSWTPDGYVAVVTMFNFQKYRHIQSPGWTLGWKWAKKEVIWSMVGAQTTEQGDCSKYKGNIPHCCKKDPTVVDLLPGTPYNQQIANCCKGGVMNSWVQDPATAASSFQISVGAAGTTNKTVRVPRNFTLMGPGPGYTCGPAKIVRPTKFVTTDTRRTTQAMMTWNITCTYSQFLAQRTPTCCVSLSSFYNETIVGCPTCACGCQNNRTESGACLDPDTPHLASVVSPPTKKGTVLPPLVQCTRHMCPIRVHWHVKQNYKEYWRVKITITNFNYRLNYTQWNLVAQHPNLDNITQIFSFNYKSLTPYAGLNDTAMLWGVKFYNDFLSEAGPLGNVQSEILFRKDQSTFTFEKGWAFPRRIYFNGDNCVMPPPDSYPFLPNGGSRSQFSFVAAVLLPLLVFFFFSA

SEQ ID NO: 152 - protein, 451 aa, Oryza sativa subsp. japonica
  misc_feature (45)..(209): Pfam Name: Phytochel_synth Pfam Description: Phytochelatin synthetase-like
  misc_feature: Public GI ID no. 75133694
  misc_feature: Bit score of 1006.3 for HMM based on sequences of Figure 3
  misc_feature: Functional Homolog Of SEQ ID NO. 117
MAVLGSLLLLILAATLSVAVAYDPLDPNGNITIKWDVMSWTPDGYVAMVTINNYQTYRQIMAPGWTVGWTWARQEVIWSMVGAQATDQGDCSRFKANLPHCCRRTPAVVDLLPGVPYNQQIANCCRGGVLPAYGQAPSAAAAAFQVSVGQAGTTNRTVRLPRNFTLLGPGPGYTCGRARVVPSTVFLTADRRRKTQALMTWNVTCTYSQHLASKYPSCCVSFSSFYNDTIVPCAKCACGCDAHKPCVRSERDGKRLAVTGKKHDANANAHGRGNGVAAAAMAAPLLQCTTHMCPVRVHWHVKLNYREYWRAKITIVNFNYRMNYTGWTLVAQHPNLDNITEVFSFDYKPVVSYGSINDTAMFYGLKYFNDQLMEAGPHGNVQSEVLMRKDARTFTFRQGWAFPRKVYFNGDECQMPPPDSYPYLPNAAPPAAASLVGSAVAMAALVFFLMA

SEQ ID NO: 153 - protein, 469 aa, Vitis vinifera
  misc_feature (60)..(224): Pfam Name: Phytochel_synth Pfam Description: Phytochelatin synthetase-like
  misc_feature: Public GI ID no. 147780878
  misc_feature: Bit score of 962.8 for HMM based on sequences of Figure 3
  misc_feature: Functional Homolog Of SEQ ID NO. 117
MGFCLSLISRSISSFCGCTILLLFLLSCSCFTSTEAYDALDPNGNITIKWDIMSWTPDGYVAVVTMYNFQQYRHIQSPGWSLQWTWAKKEVIWSMLGGQTTEQGDCSRFKGNVPHCCKKDPTVVDLLPGTPYNQQIANCCKGGVVSSWVQDPANAASSFQVSVGSAGTTNKTVRVPKNFTLKAPGPGYTCGPAKIVKPTRFVTQDGRRVTQALMTWNVTCTYSQFLSQKTPTCCVSLSSFYNDTIVPCPTCTCGCQNNITQPGSCVEEDSPYLASVVSGSGKNSYTPLVQCTKHMCPIRVHWHVKLSYKEYWRVKVTITNFNYRMNYTQWNLVVQHPNFDNLTQIFSFNYKSLTPYAAINDTAMLWGVKFYNDLLVQAGPLGNVQSELLFRKDKSTFTFEKGWAFPRRIYFNGDNCVMPPPDSYPWLPNATSRTSTSLLTLIMVLLSALLLYAHGYDNFIGKFYMQYAK

SEQ ID NO: 154 - protein, 456 aa, Vitis vinifera
  misc_feature (60)..(224): Pfam Name: Phytochel_synth Pfam Description: Phytochelatin synthetase-like
  misc_feature: Public GI ID no. 157341291
  misc_feature: Bit score of 964.1 for HMM based on sequences of Figure 3
  misc_feature: Functional Homolog Of SEQ ID NO. 117
MGFCLSLISRSISSFCGCTILLLFLLSCSCFTSTEAYDALDPNGNITIKWDIMSWTPDGYVAVVTMYNFQQYRHIQSPGWSLQWTWAKKEVIWSMLGGQTTEQGDCSRFKGNVPHCCKKDPTVVDLLPGTPYNQQIANCCKGGVVSSWVQDPANAASSFQVSVGSAGTTNKTVRVPKNFTLKAPGPGYTCGPAKIVKPTRFVTQDGRRVTQALMTWNVTCTYSQFLSQKTPTCCVSLSSFYNDTIVPCPTCTCGCQNNITQPGSCVEEDSPYLASVVSGSGKNSYTPLVQCTKHMCPIRVHWHVKLSYKEYWRVKVTITNFNYRMNYTQWNLVVQHPNFDNLTQIFSFNYKSLTPYAAINDTAMLWGVKFYNDLLVQAGPLGNVQSELLFRKDKSTFTFEKGWAFPRRIYFNGDNCVMPPPDSYPWLPNATSRTSTSLLTLIMVLLSALLLLNAHV

SEQ ID NO: 155 - protein, 448 aa, Phaseolus vulgaris
  misc_feature (53)..(217): Pfam Name: Phytochel_synth Pfam Description: Phytochelatin synthetase-like
  misc_feature: Public GI ID no. 38194916
  misc_feature: Bit score of 965.0 for HMM based on sequences of Figure 3
  misc_feature: Functional Homolog Of SEQ ID NO. 117
MGFSLLPKATPCILLLVLLYCTCFTSTDAYDPLDPNGNITIKWDIITWTPDGYVAVVTMNNFQQYRHIASPGWRLGWTWAKKEVIWSMMGGQTTEQGDCSKFKAGIPHCCKKDPTVVDLLPGTPYNQQIANCCKGGVLGSWVQDPTNAVSSFQVSVGRAGTTNKTVKVPKNFTLSAPGPGYTCGPAKIVKPTQFIQADKRRVTQALMTWNVTCQYSQFLAQKTPSCCVSLSSFYNDTIVPCPTCACGCQGNSSLSGSCVNSQTPHLASVVSGSGKNNLSPLVQCTSHMCPVRIHWHVKVNYKEYWRVKVTITNFNYRMNYSEWNMVVQHPNFDNLTQLFSFNYKSLTPYGSINDTAMLWGVKFYNDFLSQAGPNGNVQSELLFRKDKATFTFDKGWAFPRRIYFNGDNCVMPPPDAYPWLPNAGSRQEVSLFALVIAYLVALVFYAHA

SEQ ID NO: 156 - protein, 456 aa, Vitis vinifera
  misc_feature (60)..(224): Pfam Name: Phytochel_synth Pfam Description: Phytochelatin synthetase-like
  misc_feature: Public GI ID no. 157356291
  misc_feature: Bit score of 962.1 for HMM based on sequences of Figure 3
  misc_feature: Functional Homolog Of SEQ ID NO. 117
MEFFFTSIARSITKLSSYAILLVLLFSCSIFTSTEAYDSLDPEGNITIKWDVMSWTPDGYVAVVTMFNFQQYRHIQAPGWSLGWSWAKKEVIWSMMGGQTTEQGDCSRFKGNVPHCCKKDPTVVDLLPGTPYNQQIANCCKGGVINSWVQDPANAASSFQVSVGAAGTTNKTVKLPKNFTLRAPGPGYTCGPAKIVKPTKFTTADQRRVTQALMTWNVTCTYSQFLAQKTPTCCVSLSSFYNNTIVSCPTCTCGCQNNLTHPGSCVDPNNPYLASVVEGSGKTSYQPLVQCTSHMCPIRVHWHVKLNYKDYWRVKITITNFNYRMNYTQWNLVVQHPNFDNLTQIFSFNYKSLTPYAAINDTAMLWGVKFYNDLLSQAGPLGNVQSELLFRKDKATFTFDKGWAFPRRIYFNGDNCVMPPPDAYPWLPNASSRPTVSLLYSILTILAVSVIVLAYA

SEQ ID NO: 157 - DNA, 1834 bp, Gossypium hirsutum
  misc_feature: Ceres Clone ID no. 1883580
  misc_feature: Encodes the peptide sequence at SEQ ID NO. 158
ataatttaaaagaaaaaaggcgttttacagtgagattaaagtgttccactacttaaactcaaagtcttaaactttcgtgtcatgtcctgttggacgaaaaagctactcatctccgttcttctctctgagtcttccctgtctgccacagatcttgaaccgaagtcaataacaaaagaagactcctaaaatcctacagaaatgtctaatctttttttgttcattgctagatctttcttcaacctaagctctttcagcgtcttgcttctgtttttgctctctttctcaagtttcactgcaacagaagcctatgatcctttggatcctaatggaaatatcacaatcaaatgggatatcatgagttggactgctgatggctatgttgcagttgtcacaatctttaacttccagcagtaccgtcacatccaagcaccagggtggacattaggttggaaatggtctaagaaggaggtgatttggagtatgatgggaggacaaacaactgaacaaggggattgttcaagattcaaagggaacattccacattgttgtaagaaggacccaacagtcgtggatttattgccaggaacaccttataatcagcagattgcgaattgctgtaaagggggagtgctaaactcatgggtacaagatccagctacggcagcaagctcattccaggtgagtgtggggcaagctggaactacaaacaagacagttagagttccaaaaaacttcactttgaaggcaccagggcccggttatacttgtggtccagcgaaaattgtgaaacccagtagatttgttaccgcggacaaaagaagagtcacacaagctttgatgacttggaatgttacttgcacgtattcacaatttctagctcagaaaacacctacttgttgcgtctctctctcatcattctataatgaaaccatagtaccttgcccgcaatgtgcttgtggctgccaaaatacttctcagcctgggagctgtgtagaccccaaagctccgcatatagcatcggttgttccaagtacagggaagaataactatgcacctttggtccaatgtacaagtcatatgtgtccggtccgagttcattggcatgttaagctaaactacaaggagtattggcgggttaaggtcacaattactaatttcaattataatatgaactatacacagtggaacttagttgtgcaacatcccaacttcgacaatctcacccagattttcagctttaactacaagtctttaactccgtatactgcaataaatgatactgccatgttatggggtgttaaatttttcaacgatttgctttcccaagctggtcagctcggtaatgtgcagtcagagctacttttccgaaaggacaaagcaactttcacttttgagaagggttgggctttcgctcgaagaatctacttcaatggagataattgtgttatgccaccgcccgacgcctatccttggttgcctaacggcagttcccatcagcttatctccacacttagtttgttgacaactctcttggcagcaatggcatttttattgggatatgcataaagttcaaccatttttatactgggaaatctggtatgctccaaaattttgactgaatcagttcgatgtagaatgtacggcgtgagaagttgcagtttgtgtcagttagaggaagtcaatgtgcagtggtgtcgttttaatgtatggtcagtgaattcactcgtgctgttgtatgtatgcatgttcgtttatgtacttaaaccaaaaacaatgttgattgtagaattcccacgatattttattacagtagtaacagacataaatcattgac

SEQ ID NO: 158 - protein, 455 aa, Gossypium hirsutum
  misc_feature (60)..(224): Pfam Name: Phytochel_synth Pfam Description: Phytochelatin synthetase-like
  misc_feature: Ceres Clone ID no. 1883580
  misc_feature: Bit score of 955.3 for HMM based on sequences of Figure 3
  misc_feature: Functional Homolog Of SEQ ID NO. 117
MSNLFLFIARSFFNLSSFSVLLLFLLSFSSFTATEAYDPLDPNGNITIKWDIMSWTADGYVAVVTIFNFQQYRHIQAPGWTLGWKWSKKEVIWSMMGGQTTEQGDCSRFKGNIPHCCKKDPTVVDLLPGTPYNQQIANCCKGGVLNSWVQDPATAASSFQVSVGQAGTTNKTVRVPKNFTLKAPGPGYTCGPAKIVKPSRFVTADKRRVTQALMTWNVTCTYSQFLAQKTPTCCVSLSSFYNETIVPCPQCACGCQNTSQPGSCVDPKAPHIASVVPSTGKNNYAPLVQCTSHMCPVRVHWHVKLNYKEYWRVKVTITNFNYNMNYTQWNLVVQHPNFDNLTQIFSFNYKSLTPYTAINDTAMLWGVKFFNDLLSQAGQLGNVQSELLFRKDKATFTFEKGWAFARRIYFNGDNCVMPPPDAYPWLPNGSSHQLISTLSLLTTLLAAMAFLLGYA

SEQ ID NO: 159 - DNA, 1877 bp, Gossypium hirsutum
  misc_feature: Ceres Clone ID no. 1848658
  misc_feature: Encodes the peptide sequence at SEQ ID NO. 160
aataaccgacagcttgcacccatatggatggagcatgtacctctctgtctcagactctgtactaaattgcttttataagcttcacttgcaactcaacagctgacctctctcttctccatttgatgtgagaaggatctttctttctttattctgcacatcttaaccttaaccacatcataagatagagatctcttaaacgatcgagttatggagactgtcttttcagcagcaagtagatccatttccaagctcattagcttcaccgctttgcttcttttcttgttttcctgctctactttcacttctactgaagcttatgatgcgcttgatccaactggcaatatcactatcaaatgggacgtaataagttggaccccagatggctatgttgctgttgttacaatgtacaatttccaacagtatcgccatattcaggcacctggttggacattggggtggacatgggccaaaaaggaagtaatctggagcatgatgggaagccaaaccacggaacaaggggattgttcaaaatacaaaggaaacgtccctcattgctgtaaaaaggatcccacagttgtggatttattgcctggaactccttataaccagcagattgcaaattgctgcaaaggcggtgtattaaattcatgggttcaagacccagccaatgcagcaagctcatttcaggttagtgtgggcgctgcaggaacaacgaacaaaactgtgagagtgcctagaaactttaccctgaaagcaccaggtccaggatatacttgtgggcctgccaagattgtgaaacccactaaattcataacggctgataaaaggagaataactcaagctatgatgacatggaatgttacatgcacatattcccaatttctggctcaaaagactcctacatgttgcgtctcgctctcttccttctataataacactatcgtgaattgcccgacatgtgcttgtggctgtcagaataactcaactgaatctgggagttgtgtaagcgaaaggtcttcacatttagcttcagctgttccgggcaaatctaccaatgcaccacctctgcttcagtgtacgagccatatgtgtccagttcgaattcactggcatgttaagctcaactacaaggaatactggcgtgtgaagatcacaatcaccaatttcaattacgcattgaactacagtcagtggaatctagttgtgcaacaccccaactttgacaatcttacacaacttttcagcttcaattacaaaccattaactccttatgctggcttaaatgatactgccatgttatggggacttaagttttataatgatttcctcaacgaagccggtcctcttgggaatgtgcagtcagaactattattcagaaaagatgcatcaacttttacttttgaaaagggatgggcttttccacggagaatatatttcaatggtgataactgtgtcatgccacctcccgatgcctacccttggttgccgaatactggtttgaagccagttatctctctgtttcagccagtcatgacgatcttggcatcatgtgttttcttatgggctaatatgtgatgaatgctgtctgcggaaaccgctaaaactatttgttcgacatcctgcaatttgcatctggtttcatattatcacactgaagcttttggtgatcgattcaatggtgttggaatagtttggtgcggcaatgtaacacgctaaagagtggatcaaggtgcacaatctctggtccctatagcatgtggtgtattatttatatgttggggtttgtaatttacaccatttccttttggagttaactgctttgttgtatgtttcattcacatcatacacatgatcgatttatttgtagaatatccttg

SEQ ID NO: 160 - protein, 455 aa, Gossypium hirsutum
  misc_feature (60)..(224): Pfam Name: Phytochel_synth Pfam Description: Phytochelatin synthetase-like
  misc_feature: Ceres Clone ID no. 1848658
  misc_feature: Bit score of 946.6 for HMM based on sequences of Figure 3
  misc_feature: Functional Homolog Of SEQ ID NO. 117
METVFSAASRSISKLISFTALLLFLFSCSTFTSTEAYDALDPTGNITIKWDVISWTPDGYVAVVTMYNFQQYRHIQAPGWTLGWTWAKKEVIWSMMGSQTTEQGDCSKYKGNVPHCCKKDPTVVDLLPGTPYNQQIANCCKGGVLNSWVQDPANAASSFQVSVGAAGTTNKTVRVPRNFTLKAPGPGYTCGPAKIVKPTKFITADKRRITQAMMTWNVTCTYSQFLAQKTPTCCVSLSSFYNNTIVNCPTCACGCQNNSTESGSCVSERSSHLASAVPGKSTNAPPLLQCTSHMCPVRIHWHVKLNYKEYWRVKITITNFNYALNYSQWNLVVQHPNFDNLTQLFSFNYKPLTPYAGLNDTAMLWGLKFYNDFLNEAGPLGNVQSELLFRKDASTFTFEKGWAFPRRIYFNGDNCVMPPPDAYPWLPNTGLKPVISLFQPVMTILASCVFLWANM

SEQ ID NO: 161 - DNA, 1362 bp, Populus balsamifera subsp. trichocarpa
  misc_feature: Ceres Annot ID no. 1450185
  misc_feature: Encodes the peptide sequence at SEQ ID NO. 162
atgggctttcttgtctctcccatgatgagtttgttctcaaaattcactgtcctgctgctttttgtgctttggtgcgctagttttacttcaacagaagcctatgatcctcttgaccctactgggaatattacaatcaaatgggacatcataagctggactgctgatggctatgtcgctgttgtcacgatttacaacttccagcagtatcgtcacattcaagcaccaggatggtcactgggatggacatgggcaaagaaggaggtaatatggagcatgctgggaggccaagcaaccgaccaaggagattgttcaaaattcaaaggaaacgttccacattgttgtaaaaagagtccgacggttgtagatttattgccaggaactccttataaccagcagactgcaaattgctgcaaggggggagttatcagctcatgggcgcaagatccagccaatgcagcaagctccttccagcttagcgtgggttcagctggaaccagtaacaaaacagtgagattaccaaaaaacttcactctgaaggcaccaggacctggttatacttgtgctcgtgcaaaaattgttaagcctactagatttatgtctacagataaaaggagaatcactcaagctttgatgacatggaacgttacttgcacatattcacaattcctggctcagaagactcctagttgctgtgtctccctctcatcattctacaacgacactatagttccttgtccaaaatgcacctgtggctgccaaagaaacaattcggattcggggggttgtgttgatccaaatgcaccacatttagcttcggttgtttcgagtctagggaataacaaccctatgcctcttgtccaatgcacaagtcacatgtgcccgatcagagttcactggcatgttaagcttaactacaagcaatactggcgcgttaaggtcacaattacaaatttcaattataacatgaactatacgcaatggaacttagttgtgcaacaccccaactttgacaatctgacccagagtttcagttttaactaccagtcattatctccttattcagctattaatgatactgccatgttgtggggagtaaagttctacaatgacttgcttatgcaagccggtcgttctggtaatgttcagtcagagctactttttcgaaaggacaagtcaacttttacctttgataaaggctgggccttccctcggagaatctatttcaatggtgacaattgcgttatgcctcctccagatgcgtatccatggttgcctaatgcaagttcacgccagcttacttcaccgcttatgctaatgatagccttcttttctgttttggctttcttatatggatacgcgtag

SEQ ID NO: 162 - protein, 453 aa, Populus balsamifera subsp. trichocarpa
  misc_feature (57)..(221): Pfam Name: Phytochel_synth Pfam Description: Phytochelatin synthetase-like
  misc_feature: Ceres Annot ID no. 1450185
  misc_feature: Bit score of 940.5 for HMM based on sequences of Figure 3
  misc_feature: Functional Homolog Of SEQ ID NO. 117
MGFLVSPMMSLFSKFTVLLLFVLWCASFTSTEAYDPLDPTGNITIKWDIISWTADGYVAVVTIYNFQQYRHIQAPGWSLGWTWAKKEVIWSMLGGQATDQGDCSKFKGNVPHCCKKSPTVVDLLPGTPYNQQTANCCKGGVISSWAQDPANAASSFQLSVGSAGTSNKTVRLPKNFTLKAPGPGYTCARAKIVKPTRFMSTDKRRITQALMTWNVTCTYSQFLAQKTPSCCVSLSSFYNDTIVPCPKCTCGCQRNNSDSGGCVDPNAPHLASVVSSLGNNNPMPLVQCTSHMCPIRVHWHVKLNYKQYWRVKVTITNFNYNMNYTQWNLVVQHPNFDNLTQSFSFNYQSLSPYSAINDTAMLWGVKFYNDLLMQAGRSGNVQSELLFRKDKSTFTFDKGWAFPRRIYFNGDNCVMPPPDAYPWLPNASSRQLTSPLMLMIAFFSVLAFLYGYA

SEQ ID NO: 163 - protein, 442 aa, Arabidopsis thaliana
  misc_feature (50)..(214): Pfam Name: Phytochel_synth Pfam Description: Phytochelatin synthetase-like
  misc_feature: Public GI ID no. 13477083
  misc_feature: Bit score of 931.3 for HMM based on sequences of Figure 3
  misc_feature: Functional Homolog Of SEQ ID NO. 117
MNILFSRFSFLLLFLCSWTNLSNTEAYDALDPYGNITIKWDIMSWTGDGYVAVVTIFNFQQYRHIEAPGWQLGWSWMKKEVIWSMVGGQATEQGDCSKFKGNIPHCCKKTPAIVDLLPGTPYNQQISNCCRGGVISAWAQDPATAISSFQISVGQSGTTNTTVRAPRNITLKAPGPGYTCGPAKLVKPSRFISADKRRKTQSLLTWNITCTYSQFLARKTPTCCVSLSAFYNETIVPCPTCSCGCQNSSQAGTCVDCDSPKIASVVPALGKNNLEPLLQCTQHMCPIRVHWHVKTSYKEYWRVKVAITNFNYNMNYSQWNLVVQHPNFDNLTKLFSFNYKPLNPYLNINDTAMLWGIKFYNDFLSQAGPVGNVQSELLFQKNPLEFTFEKGWAFPRRIYFNGDNCVMPPPDSYPWLPNASPNIATSPFVILLITFLSVLILM

SEQ ID NO: 164 - protein, 457 aa, Oryza sativa subsp. japonica
  misc_feature (60)..(224): Pfam Name: Phytochel_synth Pfam Description: Phytochelatin synthetase-like
  misc_feature: Public GI ID no. 115463639
  misc_feature: Bit score of 955.6 for HMM based on sequences of Figure 3
  misc_feature: Functional Homolog Of SEQ ID NO. 117
MAVGGAGSSRSVAPCCCCAVLLAAALLFSAPATTEAYDALDPNGNITIKWDVMSWTPDGYVAVVTMFNYQQFRHIQAPGWQLGWTWAKKEVIWSMVGAQTTEQGDCSKFKGGTPHCCKKDPTVVDLLPGTPYNMQIANCCKAGVINTFNQDPSNAASSFQISVGLAGTTNKTVKLPKNFTLKAPGPGYTCGRAMIVRPTKFFTGDGRRATQALMTWNVTCTYSQFLAQKTPSCCVSLSSFYNDTIVNCPTCSCGCQNNGTSPGSCVNENSPYLQSAIDGPGKWTGQPLVQCTSHMCPIRIHWHVKLNYKEYWRVKITITNFNYRMNYTQWNLVAQHPNFNNITQLFSFNYKPLTPYGSKINDTAMFWGVKFYNDLLMQAGPLGNAQSELLLRKDSKDFTFDKGWAFPHRVYFNGDNCVMPPPDAYPWLPNASPLTKQPLTLSVLVFSIVLATLLAYA

SEQ ID NO: 165 - DNA, 1503 bp, Arabidopsis thaliana
  misc_feature: Ceres Clone ID no. 98007
  misc_feature: Encodes the peptide sequence at SEQ ID NO. 166
cttctctttcctctctctcacacacatcttcgagaagtttccgccggcgggagagatcaaagacaactgctgatcagaaatcagagatcagagatatgaacattctcttctccagattctcctttttgcttctgtttctctgttcttggaccattttcactttcaccacaacagaagcttatgatgcacttgatccatatggaaacattactataaaatgggatattatgagctggactggtgatggttatgtggctgttgtaacaatctttaatttccaacaataccgtcacatagaggcgccggggtggcaattaggatggagttggatgaagaaggaagtaatatggagtatggttggtggtcaagcaacagaacaaggagattgttctaagtttaagggtaacattcctcattgctgcaagaaaactccggctatcgttgatttgttaccgggaactccttataaccagcagatatccaactgttgtagagggggtgtgattagcgcgtgggcacaagaccccgcaaccgcgatttcttcgtttcagatcagtgttggccagtctggaacaactaatactacggttagagcacctaggaatataactttgaaggctccaggacctggttacacttgcgggcctgcaaaactcgttaagccgagtagattcatttccgcggataaacgaagaaagactcagtctttgcttacatggaacattacttgcacatattcgcagtttctagcacggaaaactccgacttgttgtgtctcactctcagccttctacaatgaaactatagtaccatgtccaacttgttcttgtggatgtcaaaatagttctcaagctggtacatgtgttgaccctaaaatagcttcagtagtaccagccttagggaagaacaacctcgaacctctcttgcaatgtacgcaacatatgtgtcccattcgagttcattggcatgtaaaaactagctacaaagagtactggagagtgaaggttgccatcacaaactttaactacaatatgaactactctcagtggaacttagtctttcagcatcccaacttcgacaatctcactcagcttttcagtttcaactacaaaccgcttaatccttacttgaacataaatgacacggccatgctatggggaatcaagttctacaatgattttttaagccaagctggtccagtaggcaatgtacagtcagagcttctcttccaaaagaacccattggagttcacattcgagaaaggatgggcgtttccgaggcgcatatacttcaacggtgataactgcgttatgccacctccagactcttatccatggcttccaaacgctagtccaaacattgcaacctcgccatttgtcatacttctcatcactttcttatctgttttgattcttatgtaaatggatatctatataccgtcatggacatgtttggtgatgtttacattataagtgagtgtgttattaggaaatcattctttgc

SEQ ID NO: 166 - protein, 441 aa, Arabidopsis thaliana
  misc_feature (52)..(216): Pfam Name: Phytochel_synth Pfam Description: Phytochelatin synthetase-like
  misc_feature: Ceres Clone ID no. 98007
  misc_feature: Bit score of 914.3 for HMM based on sequences of Figure 3
  misc_feature: Functional Homolog Of SEQ ID NO. 117
MNILFSRFSFLLLFLCSWTIFTFTTTEAYDALDPYGNITIKWDIMSWTGDGYVAVVTIFNFQQYRHIEAPGWQLGWSWMKKEVIWSMVGGQATEQGDCSKFKGNIPHCCKKTPAIVDLLPGTPYNQQISNCCRGGVISAWAQDPATAISSFQISVGQSGTTNTTVRAPRNITLKAPGPGYTCGPAKLVKPSRFISADKRRKTQSLLTWNITCTYSQFLARKTPTCCVSLSAFYNETIVPCPTCSCGCQNSSQAGTCVDPKIASVVPALGKNNLEPLLQCTQHMCPIRVHWHVKTSYKEYWRVKVAITNFNYNMNYSQWNLVFQHPNFDNLTQLFSFNYKPLNPYLNINDTAMLWGIKFYNDFLSQAGPVGNVQSELLFQKNPLEFTFEKGWAFPRRIYFNGDNCVMPPPDSYPWLPNASPNIATSPFVILLITFLSVLILM

SEQ ID NO: 167 - DNA, 1326 bp, Arabidopsis thaliana
  misc_feature: Ceres Annot ID no. 1326475
  misc_feature: Encodes the peptide sequence at SEQ ID NO. 168
atgaacattctcttctccagattctcctttttgcttctgtttctctgttcttggaccagtttcactttcaccacaacagaagcttatgatgcacttgatccatatggaaacattactataaaatgggatattatgagctggactggtgatggttatgtggctgttgtaacaatctttaatttccaacaataccgtcacattgaggcgccggggtggcaattaggatggagttggatgaagaaggaagtaatttggagtatggttggtggtcaagcaacagaacaaggagattgttctaagtttaagggtaacattcctcattgctgcaagaaaactccggctatcgttgatttgttaccgggaactccttataaccaacagatatcaaactgttgtagaggcggtgtgattagcgcgtgggcgcaagaccccgcaaccgcgatttcttcgtttcagattagtgttggccagtctggaacaactaatactacggttagagcacctaggaatataactttgaaggctccaggacctggttacacttgcgggcctgcaaaactcgttaagccgagtagattcatttccgcggataaacgaagaaagactcagtctttgcttacatggaacattacttgcacatattcgcagtttctagcacggaaaactccgacttgttgtgtctcactctcagccttctacaatgaaactatagtaccatgtccaacttgttcttgtggatgtcaaaatagttctcaagctggtacatgtgttgaccctaaaatagcttcagtagtaccagccttagggaagaacaacctcgaacctctcttgcaatgtacgcaacatatgtgtcccattcgagttcattggcatgtaaaaactagctacaaagagtactggagagtgaaggttgccatcacaaactttaactacaatatgaactactctcagtggaacttagtcgttcagcatcccaacttcgacaatctcactaagcttttcagtttcaactacaaaccgcttaatccttacttgaacataaatgacacggccatgctatggggaatcaagttctacaatgattttttaagccaagctggtccagtaggcaatgtacagtcagagcttctcttccaaaagaacccattggagttcacattcgagaaaggatgggcgtttccgaggcgcatatacttcaacggtgataactgcgttatgccacctccagactcttatccatggcttccaaacgctagtccaaacattgcaacctcgccatttgtcatacttctcatcactttcttatctgttttgattcttatgtaa

SEQ ID NO: 168 - protein, 441 aa, Arabidopsis thaliana
  misc_feature (52)..(216): Pfam Name: Phytochel_synth Pfam Description: Phytochelatin synthetase-like
  misc_feature: Ceres Annot ID no. 1326475
  misc_feature: Bit score of 916.0 for HMM based on sequences of Figure 3
  misc_feature: Functional Homolog Of SEQ ID NO. 117
MNILFSRFSFLLLFLCSWTSFTFTTTEAYDALDPYGNITIKWDIMSWTGDGYVAVVTIFNFQQYRHIEAPGWQLGWSWMKKEVIWSMVGGQATEQGDCSKFKGNIPHCCKKTPAIVDLLPGTPYNQQISNCCRGGVISAWAQDPATAISSFQISVGQSGTTNTTVRAPRNITLKAPGPGYTCGPAKLVKPSRFISADKRRKTQSLLTWNITCTYSQFLARKTPTCCVSLSAFYNETIVPCPTCSCGCQNSSQAGTCVDPKIASVVPALGKNNLEPLLQCTQHMCPIRVHWHVKTSYKEYWRVKVAITNFNYNMNYSQWNLVVQHPNFDNLTKLFSFNYKPLNPYLNINDTAMLWGIKFYNDFLSQAGPVGNVQSELLFQKNPLEFTFEKGWAFPRRIYFNGDNCVMPPPDSYPWLPNASPNIATSPFVILLITFLSVLILM

SEQ ID NO: 169 - protein, 473 aa, Oryza sativa subsp. japonica
  misc_feature (45)..(231): Pfam Name: Phytochel_synth Pfam Description: Phytochelatin synthetase-like
  misc_feature: Public GI ID no. 115473243
  misc_feature: Bit score of 971.0 for HMM based on sequences of Figure 3
  misc_feature: Functional Homolog Of SEQ ID NO. 117
MAVLGSLLLLILAATLSVAVAYDPLDPNGNITIKWDVMSWTPDGYVAMVTINNYQTYRQIMAPGWTVGWTWARQEVIWSMVGAQATDQGDCSRFKANLPHCCRRTPAVVDLLPGVPYNQQIANCCRGGVLPAYGQAPSAAAAAFQVSVGQAGTTNRTVRLPRNFTLLGPGPGYTCGRARVVPSTVFLTADRRRKTQALSKLTTPSSSSPAPPLMMSCLCAVTWNVTCTYSQHLASKYPSCCVSFSSFYNDTIVPCAKCACGCDAHKPCVRSERDGKRLAVTGKKHDANANAHGRGNGVAAAAMAAPLLQCTTHMCPVRVHWHVKLNYREYWRAKITIVNFNYRMNYTGWTLVAQHPNLDNITEVFSFDYKPVVSYGSINDTAMFYGLKYFNDQLMEAGPHGNVQSEVLMRKDARTFTFRQGWAFPRKVYFNGDECQMPPPDSYPYLPNAAPPAAASLVGSAVAMAALVFFLMA

SEQ ID NO: 170 - DNA, 1575 bp, Arabidopsis thaliana
  misc_feature: Ceres Annot ID no. 870466
  misc_feature: Encodes the peptide sequence at SEQ ID NO. 171
acttgtcagagacagaagattaaagaagaagaggcgtttctctctctttttttgcttcagaaaaaatggggtttttcttgtgttcctcttcttcaatcttcttcaagttcggaatctctataatctttctagtttctttctctggtttaactccttcagaagcttatgatcctttggacccgagtgggaacattactgtcaaatgggatatcataacctggactggagatggctatgtggcgactgtaacggtatataattttcagcaatatcgacacattcaagctccaggttggactcttggatggtcatgggcaaagagagaggttatatggggaatgaatggaggacaaaccacagaacaaggagattgttctaaattcaaaggaaccattcctcattgctgtaaaaagacaccttctgttgttgatctcttacctggatctccttacaatcagcagattgctaattgttgcagagggggtgtgcttaactcgtgggctcaagatcccgcaactgctgtttccgctttccagcttactgttggacaagctggaaccacaaataagacagttagggtacctaagaatttcactctcaaagctcctggaccgggatatacttgtagccccgcgaagattgtaaaaccgactagattcatcggtactgataaacgaagagttactcaagcattaatgacttggaatgtaacttgcacatactcgcagttcttagctcagaaaacaccaacttgctgtgtatctctttcatcgttttataacaagacaatagtttcttgtccaacatgctcttgtggatgcagaaacacttctcagccagggaattgtgtagacccaaaaggtccacggatagcatcagtcattccaaatccggggaagaacgcatatataccgcctctggtccaatgtacaaagcatatgtgtccagttagaatccactggcatgtgaaagtcaactacaaacagtactggagagttaaagtcaccatcacaaatttcaactacaacatgaactattcacagtggaatctcgtcgtgcagcatccgaatttcgacaatctaactcagacttttagcttcaactataaacctctgactccttatgcttccataaatgatactgggattctctggggaataaagttctacaatgatctgttgatgcaagctgggccatttggtaatgtacaatctgagctacttttccagaaagaagcatcagctttcacatttgagaaaggttgggcgtttccaagaagaatctatttcaatggagataactgtgtgatgcctcctcctgattcttacccttggctgcccaataccggctcgcacaaatcagtcggttccctgtttgcagcaatggccttgttactgattgtgttcctacatggaaacttgtaagaatcatcaagtgtagaattcttctgctgcagtttttcgaactgatataacccatcaagagagagttggtagcttagttttttgtgttctctcttgtctgtcctcttcctgtacaacgctttaatattagatggttaactagatccccttg

SEQ ID NO: 171 - protein, 452 aa, Arabidopsis thaliana
  misc_feature (57)..(221): Pfam Name: Phytochel_synth Pfam Description: Phytochelatin synthetase-like
  misc_feature: Ceres Annot ID no. 870466
  misc_feature: Bit score of 929.7 for HMM based on sequences of Figure 3
  misc_feature: Functional Homolog Of SEQ ID NO. 117
MGFFLCSSSSIFFKFGISIIFLVSFSGLTPSEAYDPLDPSGNITVKWDIITWTGDGYVATVTVYNFQQYRHIQAPGWTLGWSWAKREVIWGMNGGQTTEQGDCSKFKGTIPHCCKKTPSVVDLLPGSPYNQQIANCCRGGVLNSWAQDPATAVSAFQLTVGQAGTTNKTVRVPKNFTLKAPGPGYTCSPAKIVKPTRFIGTDKRRVTQALMTWNVTCTYSQFLAQKTPTCCVSLSSFYNKTIVSCPTCSCGCRNTSQPGNCVDPKGPRIASVIPNPGKNAYIPPLVQCTKHMCPVRIHWHVKVNYKQYWRVKVTITNFNYNMNYSQWNLVVQHPNFDNLTQTFSFNYKPLTPYASINDTGILWGIKFYNDLLMQAGPFGNVQSELLFQKEASAFTFEKGWAFPRRIYFNGDNCVMPPPDSYPWLPNTGSHKSVGSLFAAMALLLIVFLHGNL

SEQ ID NO: 172 - DNA, 1823 bp, Panicum virgatum
  misc_feature: Ceres Clone ID no. 1806851
  misc_feature: Encodes the peptide sequence at SEQ ID NO. 173
ctcgcacccacaagaatagctcaaacccgcgtgcatgtctgcatccccgggcggacacggcgcgcgccagaagcctcgcatcgccatcgcgcatacaaactggcaggccagacaccacaggacgagagacagagaggaaacctctgcttctccctctgacccactcctcgttcttctgagctcctgttgccttcctccgcacggagagcagacacgccgagagcgatcagggcagggaggggtctgctgcttacttcctgagctctgccgggccgggccatggcgggacggcggacggcgcccctgcgcctgtgcgcctccgtcgcgctgctcgtcgtcgccgtctcctctctgacgccttcgtcagatgcatacgatccactcgatccgaatgggaacataacaatcaagtgggatgtaatgcagtggactccagatggctatgtggctgttgtttccctatacaattaccagcagtaccgccacatccaagcgccgggctggaaactcggatgggtttgggcaaagaaggagataatctgggcaatgaccggtggccaagccactgagcaaggcgattgctccaaattcaaaagcaacattccccattgctgcaagaaggatcctgaggttgtggacctgcttcctggcacaccttataacatgcagatcgccaactgctgcaagggaggagtcctcaccgcatgggcacaggaccctgacaatgctgtggcttcgttccaagtcagtgttggtcaggctgggacgaccaacaagactgtgaaggtgcccaagaatttcactctgaaggctcccgggccagggtatacctgcggccctgccaaactagtgaaacctactaagttcatatcgccggatgggagaagatcaactcaagcacacatgacttggaatgtgacctgtacatactcacagtttgttgcccaaagatctccaacctgctgtgtttcgctttcatcgttttacaacgacaccattgtcaactgcccaacatgctcttgtggatgccagaataacagcactgcaccaggaagctgtgtagagggtaattcaccttatctggcctctgtcgtgaacgatcctaacaagaacagcttggcacctctagtccaatgcacttctcacatgtgcccaataagagtgcattggcatgtcaaagtgaactacaaggagtactggagggtcaagatcaccgtgacaaacttcaactaccggatgaactactcgcagtggaacctcgttgcgcagcaccccaacttcgacaacctgactaccattttcagcttcaactacaaatctctgaacccctatggcgtaataaacgacaccgcgatgttatggggcatcaagtactacaacgatctgctgatgacggctgggccggacgggaatgttcagtctgagcttctgttccggaaggagccctccaccttcaccttccagaaaggctgggctttcccaagacgagtgtacttcaatggcgacaactgcgtgatgccgccgccggacgcgtacccatggctgcccaacgcctctccacggcagtcagcttcggttctcctcacatttgttgctgtttgggcagcattggcgatcctactggccaatccctagtgatgtagtacatgtttcacagaaagttttgacctgattgcattggatgctattgccttctgatcattgagtttcttgcgatggtgttcaaatgtacagttacgtactcaaggatgtacattcccgtacttgtaaattttagcaaagactgactggcgagaaataaagctgtttcctcggcatcatgc

SEQ ID NO: 173 - protein, 451 aa, Panicum virgatum
  misc_feature (55)..(219): Pfam Name: Phytochel_synth Pfam Description: Phytochelatin synthetase-like
  misc_feature: Ceres Clone ID no. 1806851
  misc_feature: Bit score of 944.6 for HMM based on sequences of Figure 3
  misc_feature: Functional Homolog Of SEQ ID NO. 117
MAGRRTAPLRLCASVALLVVAVSSLTPSSDAYDPLDPNGNITIKWDVMQWTPDGYVAVVSLYNYQQYRHIQAPGWKLGWVWAKKEIIWAMTGGQATEQGDCSKFKSNIPHCCKKDPEVVDLLPGTPYNMQIANCCKGGVLTAWAQDPDNAVASFQVSVGQAGTTNKTVKVPKNFTLKAPGPGYTCGPAKLVKPTKFISPDGRRSTQAHMTWNVTCTYSQFVAQRSPTCCVSLSSFYNDTIVNCPTCSCGCQNNSTAPGSCVEGNSPYLASVVNDPNKNSLAPLVQCTSHMCPIRVHWHVKVNYKEYWRVKITVTNFNYRMNYSQWNLVAQHPNFDNLTTIFSFNYKSLNPYGVINDTAMLWGIKYYNDLLMTAGPDGNVQSELLFRKEPSTFTFQKGWAFPRRVYFNGDNCVMPPPDAYPWLPNASPRQSASVLLTFVAVWAALAILLANP

SEQ ID NO: 174 - protein, 446 aa, Oryza sativa subsp. japonica
  misc_feature (52)..(216): Pfam Name: Phytochel_synth Pfam Description: Phytochelatin synthetase-like
  misc_feature: Public GI ID no. 75133695
  misc_feature: Bit score of 926.5 for HMM based on sequences of Figure 3
  misc_feature: Functional Homolog Of SEQ ID NO. 117
MALLLLRMGVSVALLVAFFSSLIPSSEAYDPLDPNGNITIKWDVLQWTPDGYVAVVSLYNYQQYRHIQSPGWKLGWVWAKKEIIWAMNGGQATEQGDCSKFKSNIPHCCKKDPEIVDLLPGTPYNMQIANCCKGGVLNSWAQDPANAIASFQVSVGQAGTTNKTVRVPRNFTLKSPGPGYTCGSAKVVRPTKFFSQDGRRTTQAHMTWNVTCTYSQIVAQRSPTCCVSLSSFYNDTIVNCPTCSCGCQNNKPGSCVEGNSPYLASVVNTHNKDSLTPLVQCTSHMCPIRVHWHVKVNYKEYWRVKITVTNFNYRMNYSQWNLVTQHPSFDNLTTIFSFNYKSLNPYGVINDTAMLWGIKYYNDLLMTAGPDGNVQSELLFKKDPKSFTFEKGWAFPRRVYFNGDNCVMPPPDAYPWLPNASTRVMSSILLPFITIWTALTFLMVYA

SEQ ID NO: 175 - DNA, 1948 bp, Panicum virgatum
  misc_feature: Ceres Clone ID no. 1788775
  misc_feature: Encodes the peptide sequence at SEQ ID NO. 176
aagggagcagccgctgcggagcagagtgtcgcgctgccgccgcggtaaaaacaggggaggagggagagacgcggccgcacccgcacatgctttaagtcccactccccaccgccccagatctccgccctcctccctctgccccccacattccccggcgcgccacctctgcccgcggccgccgccgctgtccggagcgagatcggcgtgggtgcacgggcgcagctcctgtatctgtcggtgggagaccccgcgcgtgtcggtgggagcgggtggggaggaagcgaaggatggcggcgggcggcagatccgtcgcgtgctgcaccgccgtgctgctcgcggccgcgctgctcctctccgcgccgactgccacagaggcttatgattccttggatccgaacggcaacatcactataaaatgggatattatgcagtggactcctgatggatatgtcgctgttgtcacaatgttcaactatcaacaattccggcacattggggcacctgggtggcagcttgggtggacatgggcaaagaaagaggtcatatggtcaatggttggggcacagactaccgaacagggtgactgctcgaaattcaagggcaacactccccactgctgcaagaaagatcccacgatcgtcgatttacttccgggcactccatacaacatgcaaattgccaattgctgcaaagcaggagttataaatacatttaatcaggacccagcaaatgctgcttcctccttccagattagtgtaggtcttgctgggactaccaataagactgttaaggtgccgaagaacttcactcttaagactccaggtcctgggtacacctgtgggcgtgccattgttggcaggccgacaaagtttttcacctcggatggacgcagggcaacccaagctctaatgacgtggaatgtgacttgcacatattcccaatttctagcccagaagactccgtcctgctgtgtatctctctcatcattttacaatgacacaattgtgaactgcccaacatgctcttgtggctgccaaaatccaagtggctccaactgtgtgaatgaggattcaccgaatctacaatctgcaattgatggccctgggaaatggactggtcagcctcttgtacaatgcacctcccacatgtgcccgataagaatccactggcatgtgaagctcaattacaaggaatactggagagtgaaaatcactatcacaaacttcaacttccgcatgaattacacgcagtggaacttagtcgttcagcatccaaactttgataatatcactcagctgttcagtttcaactacaaaccacttaccccatatggtggtggcataaatgatacggcaatgttctggggtgtaaaattctacaacgatttgctgatgcaagctggtaaacttgggaatgtgcaatcagaactacttcttcgcaaggactcccaggctttcaccttcgaaaagggatgggccttcccacgccgagtgtacttcaatggtgataactgtgtcatgccatctcctgaaaattatccatggctgcccaatgcaagccctctaacaaaacaaccattgacactcccactcttagtattctgggttgtgttggctactctgttggcttatgcgtgatgagtgggatcaagagatttagcgagcttcaagttgatgtcagattccatgaggtgcactgcagcaggccatttgttcattcacttccatggttgcacagaagagatgacaccacgccgagaaaagaaagtttatatgtgtgtgtgtttttggaagttaaggcccaaaatgtatttcttgtctggtatatactggccccacagcactttggtgaacttagttactgcaaattaggtaattacagttgcaccttttgtattttatagcaaactcagaatttttcattgaattatgactgctcttcttgtagc

SEQ ID NO: 176 - protein, 449 aa, Panicum virgatum
  misc_feature (54)..(218): Pfam Name: Phytochel_synth Pfam Description: Phytochelatin synthetase-like
  misc_feature: Ceres Clone ID no. 1788775
  misc_feature: Bit score of 935.6 for HMM based on sequences of Figure 3
  misc_feature: Functional Homolog Of SEQ ID NO. 117
MAAGGRSVACCTAVLLAAALLLSAPTATEAYDSLDPNGNITIKWDIMQWTPDGYVAVVTMFNYQQFRHIGAPGWQLGWTWAKKEVIWSMVGAQTTEQGDCSKFKGNTPHCCKKDPTIVDLLPGTPYNMQIANCCKAGVINTFNQDPANAASSFQISVGLAGTTNKTVKVPKNFTLKTPGPGYTCGRAIVGRPTKFFTSDGRRATQALMTWNVTCTYSQFLAQKTPSCCVSLSSFYNDTIVNCPTCSCGCQNPSGSNCVNEDSPNLQSAIDGPGKWTGQPLVQCTSHMCPIRIHWHVKLNYKEYWRVKITITNFNFRMNYTQWNLVVQHPNFDNITQLFSFNYKPLTPYGGGINDTAMFWGVKFYNDLLMQAGKLGNVQSELLLRKDSQAFTFEKGWAFPRRVYFNGDNCVMPSPENYPWLPNASPLTKQPLTLPLLVFWVVLATLLAYA

SEQ ID NO: 177 - DNA, 1849 bp, Zea mays
  misc_feature: Ceres Clone ID no. 1546455
  misc_feature: Encodes the peptide sequence at SEQ ID NO. 178
gccctcctcaccactgcccccccattccccggcgcccagcacccggcgccgcaaccgccgcagtccggagcaagatcggtgggtagacggacgggcgacaggcgggcgggcgcggctctgtctgtatctatctgttggtgggagaccggttgtgtcggttaggcggcggcgggtgggaaggaagaatggcggcgggcggcagatccatcgcgtgcgttgccgccgtgctgctcgcggccgcgctgctcctctccgcaccgaccaccacagaggcctacgattcgctggatccaaacggcaacatcactataaaatgggatatcatgcagtggactcctgacggatatgtcgctgttgtcacaatgttcaattatcaacaatttcggcacatcggggcacctggatggcagcttgggtggacatgggcaaaaaaggaggttatatggtcaatggttggggctcagaccactgaacagggtgactgctcaaagttcaagggcaacaccccccattgctgcaagaaagatccaacaattgttgatttacttccaggcactccatacaacatgcaaattgccaattgctgcaaggcaggagttataaatacctttaaccaggacccagcaaatgctgcttcctccttccagatcagtgttggtcttgctggaactaccaataaaactgttaaggtgccgaagaatttcactcttaagactccaggccctgggtacacatgtgggcgtgctattgttggcaggccaacgaagtttttctctgcagatgggcgcagggtaacccaagctctaatgacatggaatgtgacctgcacatattcccaatttcttgctcagaagactccatcctgctgtgtatctctctcatcattttataatgacacaattgtgaactgcccgacatgctcatgtggctgccagaacccaagtgggtcaaactgtgtgaacgaggattcacctaatctacaagccgcaattgatggtcctggtaaatggactggccagcctcttgtacaatgcacttctcacatgtgcccaataagaatccactggcatgtgaagctcaactacaaggaatactggagagtgaaaatcactatcacgaacttcaacttccgcatgaattacacacagtggaacttagttgctcagcatccaaactttgataatatcactcagttgttcagcttcaactacaaaccacttactccatatgggggtggcataaatgatacggcaatgttctggggtgtaaagttctacaatgatttgctgatgcaagccggcaaacttgggaatgtgcaatcagaactgcttctccgcaaggactcacggactttcacattcgaaaagggatgggccttcccacgccgagtgtacttcaatggtgataattgtgtcatgccatctcctgaaaattatccatggctgccgaatgcaagccctctaacaaaacaagcattgacactcccactcttgatattctgggttgccttggctgttctgttggcttatgcatgatgagtgggatcaagatgtttagcaagcttcaagttgatgtcggattccatgaggtgcactgcaacgggatatttattcattcaattccatagcggcacaggagagatgaggcgaagccaagaaaaagtggatgtgtgtgtgtgtgtgtttgtaagttaaagggccaaaatgtatttcttgtctggtagtatatagcagctctacaacactttggtgaacttagttactgcaaattaggcaattacagttgcaccttttgtattttatagcaaacccagacttctattggattctatgactgcccctcttgtagc

SEQ ID NO: 178 - protein, 449 aa, Zea mays
  misc_feature (54)..(218): Pfam Name: Phytochel_synth Pfam Description: Phytochelatin synthetase-like
  misc_feature: Ceres Clone ID no. 1546455
  misc_feature: Bit score of 936.8 for HMM based on sequences of Figure 3
  misc_feature: Functional Homolog Of SEQ ID NO. 117
MAAGGRSIACVAAVLLAAALLLSAPTTTEAYDSLDPNGNITIKWDIMQWTPDGYVAVVTMFNYQQFRHIGAPGWQLGWTWAKKEVIWSMVGAQTTEQGDCSKFKGNTPHCCKKDPTIVDLLPGTPYNMQIANCCKAGVINTFNQDPANAASSFQISVGLAGTTNKTVKVPKNFTLKTPGPGYTCGRAIVGRPTKFFSADGRRVTQALMTWNVTCTYSQFLAQKTPSCCVSLSSFYNDTIVNCPTCSCGCQNPSGSNCVNEDSPNLQAAIDGPGKWTGQPLVQCTSHMCPIRIHWHVKLNYKEYWRVKITITNFNFRMNYTQWNLVAQHPNFDNITQLFSFNYKPLTPYGGGINDTAMFWGVKFYNDLLMQAGKLGNVQSELLLRKDSRTFTFEKGWAFPRRVYFNGDNCVMPSPENYPWLPNASPLTKQALTLPLLIFWVALAVLLAYA

SEQ ID NO: 179 - DNA, 1771 bp, Panicum virgatum
  misc_feature: Ceres Clone ID no. 1902642
  misc_feature: Encodes the peptide sequence at SEQ ID NO. 180
agggagcagccgctgcggagcagagtgtgtcgcgctgccgccgcggtaaaaaacaggggagggcgaggcgcggccgcacatgctttaagtcccactccccaccgccccagatctccgcccccctcccactccggcactcccccccacattccccggcgcgccacctctgcccgcggccgccgccgccgccgtccggagcgagatcggcgtgggtgcacgggcgcggctcctgtatctgtcggtgggagaccccgcgtgtcggtgggagcgggtggggaccaagcgaaggatggcgccgggcggcagatccgtcgcgtgctgcgccgccgtgctgctcgcggccgcgctgctcctctccgcgccgactgctacagaggcttatgattccttggatccgaacggcaacatcactataaaatgggatattatgcagtggactcctgatggatatgtcgctgttgtcacaatgttcaactatcaacaattccggcacattggggcacctgggtggcagcttgggtggacatgggcaaagaaagaggtcatatggtcaatggttggggcacagactactgagcagggtgactgctcgaaattcaaaggcaacactccccactgctgcaagaaagatcccacgctcgtcgatttacttccgggcactccgtacaacatgcaaattgccaattgctgcaaagcaggagttataaatacatttaatcaggacccagcaaatgctgcttcctccttccagattagtgtaggtcttgctgggaccaccaataagactgttaaggtgccgaagaacttcactcttaagactccaggtcctgggtacacatgtgggcgtgccattgttggcaggccgacaaagtttttcacatcagatggacgcagggcaacccaagctctaatgacatggaatgtgacttgcacatattcccaatttctagcccagaagactccgtcctgctgtgtatctctctcatcattttacaatgacacaattgtgaactgcccaacatgctcttgtggctgccaaaatccaactggctcaaactgtgtgaatgaggattcaccgaatctacaatcagcaattgatggccctgggaaatggactggtcagcctcttgtacaatgcacctcccacatgtgcccgataagaatccactggcatgtgaagctcaattacaaggaatactggagagtgaaaataactatcaccaacttcaacttccgcatgaattacacgcaatggaacttagttgttcagcatccaaactttgataatatcactcagctgttcagtttcaactacaaaccacttaccccatatggtggtggcataaatgatacggcaatgttctggggtgtaaaattctacaatgatttgctgatgcaagctggtaaacttgggaatgtgcaatcagaactacttcttcgaaaggattctcaggctttcaccttcgaaaagggatgggccttcccacgtcgagtgtacttcaatggtgataactgtgtcatgccgtcccctgaaaattatccatggctgcccaatgcaagccctctaacaaaacaaccattgacactcccactctttgtattctgggttgtgttggctactctgttggcttatgcatgatgagtgggatcaagagatttagcgagcttcaagttgatgtcagattccatgaggtgcactgcaacaggccatttgttcattcaattccatggttgcacttcttaatgaaaaacgtgctcaggcacggtcgcg

SEQ ID NO: 180 - protein, 449 aa, Panicum virgatum
  misc_feature (54)..(218): Pfam Name: Phytochel_synth Pfam Description: Phytochelatin synthetase-like
  misc_feature: Ceres Clone ID no. 1902642
  misc_feature: Bit score of 935.1 for HMM based on sequences of Figure 3
  misc_feature: Functional Homolog Of SEQ ID NO. 117
MAPGGRSVACCAAVLLAAALLLSAPTATEAYDSLDPNGNITIKWDIMQWTPDGYVAVVTMFNYQQFRHIGAPGWQLGWTWAKKEVIWSMVGAQTTEQGDCSKFKGNTPHCCKKDPTLVDLLPGTPYNMQIANCCKAGVINTFNQDPANAASSFQISVGLAGTTNKTVKVPKNFTLKTPGPGYTCGRAIVGRPTKFFTSDGRRATQALMTWNVTCTYSQFLAQKTPSCCVSLSSFYNDTIVNCPTCSCGCQNPTGSNCVNEDSPNLQSAIDGPGKWTGQPLVQCTSHMCPIRIHWHVKLNYKEYWRVKITITNFNFRMNYTQWNLVVQHPNFDNITQLFSFNYKPLTPYGGGINDTAMFWGVKFYNDLLMQAGKLGNVQSELLLRKDSQAFTFEKGWAFPRRVYFNGDNCVMPSPENYPWLPNASPLTKQPLTLPLFVFWVVLATLLAYA

SEQ ID NO: 181 - DNA, 1350 bp, Sorghum bicolor
  misc_feature: Ceres Annot ID no. 8632643
  misc_feature: Encodes the peptide sequence at SEQ ID NO. 182
atggcggcgggcggcagatccgtcgcgtgctgtgccgccgtgctgctcgcggccgcgctgctcctctccgcaccgactaccacagaggcttatgattcgctggatccaaccggcaacatcactataaaatgggatattatgcagtggactcctgacggatatgtcgctgttgtcacaatgtataattttcaacaatttcggcacatcggcgcacctggttggcagcttgggtggacatgggcaaagaaggaggttatatggtcaatggttggggctcagaccactgaacagggtgactgctcaaagttcaagggcaacaccccccattgctgcaagaaagatccaacaattgtcgatttactaccaggcactccatacaacatgcaaattgccaattgctgcaaggcaggagtcataaatacctttaaccaggacccagcaaatgctgcttcctccttccagatcagtgttggtcttgccggaactaccaataaaactgttaaggtgccaaagaacttcactcttaagactccaggccctgggtacacatgtgggcgtgccattgttggcaggccgacaaagttttggagcgcagatgggcgcagggcaacccaagctctaatgacatggaatgtgacctgcacatattcccaatttcttgctcagaagactccatcctgctgtgtctctctctcatcgttttataatgacacaattgtgaactgcccaacatgctcatgtggctgccagaacccaagtgggtcaaactgtgtgaatgaggattcacctaatctacaagctgcaattgatggtcctggcaaatggactggccagcctcttgtacaatgcacttcccacatgtgcccgataagaatccactggcatgtgaagctcaactacaaggaatactggagagtgaaaatcactatcacaaacttcaacttccgcatgaattacacgcagtggaacttagtagctcagcatccaaactttgataacatcactcagttgttcagcttcaactacaaaccacttactccatatgggggtggcataaatgatacggcaatgttctggggtgtaaaattctacaatgatttgctgatgcaagccggcaaacttggaaatgtgcaatcggaactgcttctccgcaaggactcccggactttcaccttcgataaggggtgggccttcccacgccgggtgtacttcaatggtgataattgtgtcatgccatctcctgaaaattatccatggctgccgaatgcaagccctctaacaagacaaccattgacactcccactcttggtattctgggttgccttggctgctctgttggcttatgcatga

SEQ ID NO: 182 - protein, 449 aa, Sorghum bicolor
  misc_feature (54)..(218): Pfam Name: Phytochel_synth Pfam Description: Phytochelatin synthetase-like
  misc_feature: Ceres Annot ID no. 8632643
  misc_feature: Bit score of 933.1 for HMM based on sequences of Figure 3
  misc_feature: Functional Homolog Of SEQ ID NO. 117
MAAGGRSVACCAAVLLAAALLLSAPTTTEAYDSLDPTGNITIKWDIMQWTPDGYVAVVTMYNFQQFRHIGAPGWQLGWTWAKKEVIWSMVGAQTTEQGDCSKFKGNTPHCCKKDPTIVDLLPGTPYNMQIANCCKAGVINTFNQDPANAASSFQISVGLAGTTNKTVKVPKNFTLKTPGPGYTCGRAIVGRPTKFWSADGRRATQALMTWNVTCTYSQFLAQKTPSCCVSLSSFYNDTIVNCPTCSCGCQNPSGSNCVNEDSPNLQAAIDGPGKWTGQPLVQCTSHMCPIRIHWHVKLNYKEYWRVKITITNFNFRMNYTQWNLVAQHPNFDNITQLFSFNYKPLTPYGGGINDTAMFWGVKFYNDLLMQAGKLGNVQSELLLRKDSRTFTFDKGWAFPRRVYFNGDNCVMPSPENYPWLPNASPLTRQPLTLPLLVFWVALAALLAYA

SEQ ID NO: 183 - DNA, 1845 bp, Zea mays
  misc_feature: Ceres Clone ID no. 236876
  misc_feature: Encodes the peptide sequence at SEQ ID NO. 184
gagtgtctcgtgctgctgcttccgctgcagtaaaatacggggaagaggaggggagggagacgcggccgctgcctgccgcacatgctttaagtcccactccccacctccccagatctccgccctcctccccaccgcccccattcctcccctcggccgcaaccgtagccgccgcactacggagcaagatcgtcgggtagacggacgggcgggcgggcgggcgcggctctgtatctatctgtcggtgggagaccgcgtgtgtcggttaggcggcgggtggcaaggaagaatggcggcgagcggcagatccgtcgcgtgctgtgccgccgcgctgctcgcggccgcgttgctcctctccgcaccgactgcaacagaggcttatgattcgctggatccaaatggcaacatcaccataaaatgggatatcatgcagtggactcctgatggatatgtcgctgttgtcacaatgtttaattatcaacaatttcggcatatcggcgcacctggttggcagcttgggtggacatgggcaaagaaggaggttatatggtcaatggttggggctcagaccactgaacagggcgactgctcaaagttcaagagcagcccaccccattgctgcaagaaagatccaacaattgtcgatttacttccaggcactccatacaacatgcaaattgccaattgctgcaaggcaggagttgtaaatacctttaaccaggacccagcaaatgctgcttcctccttccagatcagtgttggtcttgctggaactaccaataaaactgttaaggtgcccaggaacttcactcttaagactccaggccctgggtacacatgtgggcgtgccattgttggcaggcctacgaagtttttcaccgcggacgggcgcagggcaacccaagctctaatgacatggaatgtgacctgcacatattcccaatttcttgctcagaagactccatcctgctgtgtatctctatcatcgttttataatgacacaattgtgaactgcccaacatgctcatgtggctgccagaacccaagtgggtcaaactgtgtgaatgaggattcacctaatctacaagctgcaattgatggccctggcaaatgcactggtcagccccttgtacaatgcacttcccacatgtgcccgataagaatccactggcatgtgaagctcaactacaaggattactggagagtgaaaatcactatcacaaacttcaacttccgcatgaattacacgcagtggaacttagtagcccagcatccaaactttgataatatcactcagttgttcagcttcaactacaaaccacttactccatatggtggtggcataaatgatacggcaatgttctggggtgtaaaattctacaatgatctgctgatgcaagccggcaaacttgggaatgtgcaatcagagctgcttctccgcaaggactcccggactttcactttcgaaaagggatgggccttcccacgccgagtttacttcaatggtgataattgtgtcatgccatctcctgaaaattatccatggctgccgaatgcaagccctctaacaaaaccattggcactcccattcttggtattctgggttgccttggctgctctgttggcttatgcatgattagtgggatcaagaggtttagcaagtttcaagttgatgtcagattccatgaggtgcactgcaacaagtcatttgttcattcaattccatggttgcacagaaaagatgaggcgatgccaagaaaaagtcgatatgtctatgtgtttaagttaaagggccaaaatgtatttcttgtttggtatataacagccctacaacactttggtgaactg

SEQ ID NO: 184 - protein, 448 aa, Zea mays
  misc_feature (54)..(218): Pfam Name: Phytochel_synth Pfam Description: Phytochelatin synthetase-like
  misc_feature: Ceres Clone ID no. 236876
  misc_feature: Bit score of 928.6 for HMM based on sequences of Figure 3
  misc_feature: Functional Homolog Of SEQ ID NO. 117
MAASGRSVACCAAALLAAALLLSAPTATEAYDSLDPNGNITIKWDIMQWTPDGYVAVVTMFNYQQFRHIGAPGWQLGWTWAKKEVIWSMVGAQTTEQGDCSKFKSSPPHCCKKDPTIVDLLPGTPYNMQIANCCKAGVVNTFNQDPANAASSFQISVGLAGTTNKTVKVPRNFTLKTPGPGYTCGRAIVGRPTKFFTADGRRATQALMTWNVTCTYSQFLAQKTPSCCVSLSSFYNDTIVNCPTCSCGCQNPSGSNCVNEDSPNLQAAIDGPGKCTGQPLVQCTSHMCPIRIHWHVKLNYKDYWRVKITITNFNFRMNYTQWNLVAQHPNFDNITQLFSFNYKPLTPYGGGINDTAMFWGVKFYNDLLMQAGKLGNVQSELLLRKDSRTFTFEKGWAFPRRVYFNGDNCVMPSPENYPWLPNASPLTKPLALPFLVFWVALAALLAYA

SEQ ID NO: 185 - protein, 436 aa, Cleome spinosa
  misc_feature (40)..(204): Pfam Name: Phytochel_synth Pfam Description: Phytochelatin synthetase-like
  misc_feature: Public GI ID no. 90657629
  misc_feature: Bit score of 893.8 for HMM based on sequences of Figure 3
  misc_feature: Functional Homolog Of SEQ ID NO. 117
MAWSLDSSGLTLLQEAYDALDPDGNITIKWDIMTWTADGYVAVVTIYNFQQYRHIQAPGWSLGWTWAKREVIWGMNGGQTTEQGDCSRFKGNIPHCCKQDPTVVDLMPGTPYNQQIANCCKGGVINSFAQDPATTVSAFQLTVGQAGTTNKTVRVPKNFTLKAPGPGYTCSPGNIVKPSRFISADKRRITQALMTWNVTCTYSQFLAQKTPTCCVSLSSFYTNTIVSCPTCACGCRKTSETGTCVDPKGPRIASVIQSPGKNSYMPPLVQCTNHMCPIRIHWHVKVNYKEYWRVKISITNFNYVMNYSQWNVVVQHPNFDNLTQIFSFNYKPLTPYASINDTGILWGVKYYNDLLMQAGPSGNVQSELLFRKDPLSFTLEKGWAFPRRIYFNGDNCVMPPPDSYPRLPNFGSSLIGSRPVAVLTFLSVTAFLHRNL

SEQ ID NO: 186 - protein, 457 aa, Triticum monococcum
  misc_feature (59)..(223): Pfam Name: Phytochel_synth Pfam Description: Phytochelatin synthetase-like
  misc_feature: Public GI ID no. 30090032
  misc_feature: Bit score of 917.6 for HMM based on sequences of Figure 3
  misc_feature: Functional Homolog Of SEQ ID NO. 117
MAPVGGVAGSSRSAACCAVLLAAVLFFSAPATTEAYDSLDPNGNITIKWDIISWTPDGYVATVTMFNYQQFRHIPAPGWQLGWSWAKKEVIWSMVGAQATEQGDCSKFKSAPPHCCKRDPTIVDLLPGTPFNQQIANCCKAGVIKTFNQDPGNAASSFQISVGLAGTTNKTVKMPKNFTLRAPGPGYTCGRALVGRPTKYYSSDGRRVTQALMSWNVTCTYSQFLAQKTPTCCVSLSSFYNDTIVNCPTCSCGCQNNITRPGSCVNDNSPYLQSAINGPGKLTGQPLVQCTSHMCPIRIHWHVKLNYKDYWRVKVTITNFNYRMNYTDWNMVAQHPNFDNITKLFSFNYKPLTPYGGRINDTAMFWGMKFYNDLLNQAGPLGNAQSELLMRKDSETFTFQKGWAFPRRVYFNGDNCVMPSPDDYPWLPSASPLTKQPWTLPLLVFWTALATLLAYYV

SEQ ID NO: 187 - DNA, 1380 bp, Sorghum bicolor
  misc_feature: Ceres Annot ID no. 8640602
  misc_feature: Encodes the peptide sequence at SEQ ID NO. 188
atggcgaggctgcgactcctactgctccggcatctggctgccgccgctgctctgctcgccggcttctcttctctgccacctttggcagaagcatatgatcctcttgatccaaatgggaatatcacaataaaatgggatatcattcagtggacttcagatggttatgttgctgttgtttccatatacaattaccataaataccgacatatccaagcacccgggtggaaccttggatgggtgtgggcaaagaaggagatcatctggaccatagttggcgggcagaccacagagcaaggggattgctctcagttcaaaggcagtataccacactgctgcaagagggatccagcagttgttgacttgcttcctgggacaccttacaacatgcaggatgcaaattgttgcaaaggaggagtgcttaactcatgggttcaagacccagtcagtgcagtggcatcgtttcagatcagtgtcggccgatctggtactaccaactacacagtgaaagcgccactaaacttcactctgaaggccccaggaccaggatacagttgtggagtagctcatgtggtgaagcctcctacgaagttcatttcccaggacggaaggagaaccactcaagctcatgtgacatggaacgtgacatgtacatattcccaatttgttgctcagcgggctccaacttgttgtgtttcactctcatcattttacaatgaaaccatagttaactgcccaaaatgttcatgtggctgtcagaataccagaccgggaagttgtgttgagggtgattcaccttatttggcttctgtcgtgaatggaccgggcaagagcagcatgactcctctagttcagtgcacgccccatatgtgcccgataagagtgcattggcatgttaagctcaactacagggaatactggagggtgaagatcacggttacaaactggaattaccggatgaattactcacaatggaacttggtagttcagcacccaaatttcgacaaagttaccactattttcagcttcaactacaagcctctgaacccctatggagtaataaatgatactggaatgctgtggggtatcaagtactacaatgacctgctcatggtggctgggccagatggaaatgtgcaatctgagcttctgttccggaaggacccgtcgacattcactttcgagaaaggctgggcgttcccaaggcggatatacttcaatggcgacagctgtgtcatgcctccaccagatgcgtacccatggctaccaaactcttcccctgtactcctactgaagagctcatccctcgttctgcccatcgtgatttggacggcgatgctgttcttacggcttggtatgtactcaatccatcccaaattgtaa

SEQ ID NO: 188 - protein, 459 aa, Sorghum bicolor
  misc_feature (55)..(220): Pfam Name: Phytochel_synth Pfam Description: Phytochelatin synthetase-like
  misc_feature: Ceres Annot ID no. 8640602
  misc_feature: Bit score of 896.0 for HMM based on sequences of Figure 3
  misc_feature: Functional Homolog Of SEQ ID NO. 117
MARLRLLLLRHLAAAAALLAGFSSLPPLAEAYDPLDPNGNITIKWDIIQWTSDGYVAVVSIYNYHKYRHIQAPGWNLGWVWAKKEIIWTIVGGQTTEQGDCSQFKGSIPHCCKRDPAVVDLLPGTPYNMQDANCCKGGVLNSWVQDPVSAVASFQISVGRSGTTNYTVKAPLNFTLKAPGPGYSCGVAHVVKPPTKFISQDGRRTTQAHVTWNVTCTYSQFVAQRAPTCCVSLSSFYNETIVNCPKCSCGCQNTRPGSCVEGDSPYLASVVNGPGKSSMTPLVQCTPHMCPIRVHWHVKLNYREYWRVKITVTNWNYRMNYSQWNLVVQHPNFDKVTTIFSFNYKPLNPYGVINDTGMLWGIKYYNDLLMVAGPDGNVQSELLFRKDPSTFTFEKGWAFPRRIYFNGDSCVMPPPDAYPWLPNSSPVLLLKSSSLVLPIVIWTAMLFLRLGMYSIHPKL

SEQ ID NO: 189 - protein, 458 aa, Oryza sativa subsp. japonica
  misc_feature (53)..(218): Pfam Name: Phytochel_synth Pfam Description: Phytochelatin synthetase-like
  misc_feature: Public GI ID no. 115453533
  misc_feature: Bit score of 894.2 for HMM based on sequences of Figure 3
  misc_feature: Functional Homolog Of SEQ ID NO. 117
MARFLLGAAAIALLAGVSSLLLMVPFAEAYDPLDPNGNITIKWDITQWTPDGYVAVVTIYNFQKYRHIQAPGWSLGWAWAKKEIIWSMAGGQATEQGDCSAFKANIPHCCKRDPRVVDLVPGAPYNMQFGNCCKGGVLTSWVQDPLNAVASFQITVGHSGTSNKTVKAPKNFTLKAPGPGYSCGLAQEVKPPTRFISLDGRRTTQAHVTWNVTCTYSQFVAQRAPTCCVSLSSFYNETIVNCPKCACGCQNKKPGSCVEGNSPYLASVVNGPGKGSLTPLVQCTPHMCPIRVHWHVKLNYRDYWRVKVTITNWNYRMNYSQWNLVVQHPNFENVSTVFSFNYKSLNPYGVINDTAMMWGVKYYNDLLMVAGPDGNVQSELLFRKDRSTFTFDKGWAFPRRIYFNGESCVMPSPDLYPWLPPSSTPRFRTVFLLMSFLVCGTLAFLHNHLVLDKNCGKC

SEQ ID NO: 190 - protein, 460 aa, Zea mays
  misc_feature (57)..(223): Pfam Name: Phytochel_synth Pfam Description: Phytochelatin synthetase-like
  misc_feature: Public GI ID no. 162462330
  misc_feature: Bit score of 900.6 for HMM based on sequences of Figure 3
  misc_feature: Functional Homolog Of SEQ ID NO. 117
MAPPPLLPARFVAASVALLAVAFSSSLTRPSGAYDPLDPNGNITIKWDVIQWTADGYVAVVSLYNYQQYRHIQAPPGWRLGWVWAKKEVIWAMTGGQATEQGDCSRFKASVLPHCCRRDPEVVDLLPGTPYNTQTANCCRGGVLASWAQDPSDAVASFQVSVGQAGSTNRTVKVPRNFTLLAPGPGYTCGAAKLVKPTKFMSQDGRRSTQAHMTWNVTCTYSQFLAQRSPTCCVSLSSFYNDTIVSCPACSCGCQNNNSSSTAAPGSCVEGSRRSPYLASVVNDPSKNSLAPLVQCTSHMCPVRVHWHVKVSYKEYWRVKITVTNFNYRMNYSQWNLVAQHPNFDNLTTIFSFNYRPLNPYGVINDTAMLWGIKYYNDLLMTAGPDGNVQSELLFRKEPSTFTFHKGWAFPRRVYFNGDNCVMPPPDAYPWLPNAASPRLSPSLLLPLVAAAWTAFAVLS

SEQ ID NO: 191 - protein, 456 aa, Triticum aestivum
  misc_feature (59)..(222): Pfam Name: Phytochel_synth Pfam Description: Phytochelatin synthetase-like
  misc_feature: Public GI ID no. 38230578
  misc_feature: Bit score of 900.3 for HMM based on sequences of Figure 3
  misc_feature: Functional Homolog Of SEQ ID NO. 117
MAPVGGVAGSSRSAACCAVLLAAVLFFSAPATTEAYDSLDPNGNITIKWDIISWTPDGYVATVTMFNYQQFRHIPAPGWQLGCSWAKKEVIWSMVGAQATEQGDCSKFKSAPPHCCKRDPTIVDLLPGTPFNQQIANCCKAGVIKTFNQDPGNAASSFQISVGLAGTTNKAVKMPKNFTLRAPGPGYTCGRALVGRPTKYYSDGRRVTQALMSWNVTCTYSQFLAQKTPTCCVSLSSFYNDTIVNCPTCSCGCQNNITRPGSCVNDNSPYLQSAINGPGKLTGQPLVQCTSHMCPIRIHWHVKLNYKDYWRVKVTITNFNYRMNYTDWNMVAQHPNFDNITKLFSFNYKPLTPYGGRINDTAMFWGMKFYNDLLNQAGPLGNAQSELLMRKDSETFTFQKGWAFPRRVYFNGDNCVMPSPDDYPWLPSASPLTKQPWTLPLLVFWTVLSTLLAYYV

SEQ ID NO: 192 - DNA, 1278 bp, Sorghum bicolor
  misc_feature: Ceres Annot ID no. 8632641
  misc_feature: Encodes the peptide sequence at SEQ ID NO. 193
atggcgacgggcggcagactggccgtcacttgctccgccgccgtgctgctcgccgtggcgctgctgatctccgcaccggacgccgcagaggcttatgattctctagatccaaacggcaacatcactataaaatgggatgttatgcaatggactcctgatggatatgtcgctgttgtcacaatgtacaattaccaacaatttcggcacattgggccacccggatggcagcttgggtggacatgggcaaagaaggaggttatatggtcaatggttggggctcaggccaccgaacagggtgactgctcaaagttcaagggcaacattcctcacagctgcaagaaagatcccgtgatcgttgatttacttccaagcacaccatatgacatgcaaattgccaattgctgcaaggcaggagttataagtacaattagtcaggatccagcaaatgctgcttcctcatttcagctcagtgtaggtctttctgggtctaccactaagactgtcaaggtgccgaagaacttcacccttaggactcctggccccggttacacctgtgggcgtgctattgttggcaagcctactatatttttctctgcagatggccgcagggcaaccaaagctctaatgacatggaatgtgacctgcacgtattcccaatttcttgctcagaagactccgtcctgctgtgtatctctttcatcgttttataacaacactactgtgaactgcccaacatgctcctgtggctgccagaacccaagtggatcaaactgtgtgaataagggttcgcctcgcctacgatctgctattgatggccctggcaaatggagtggcgagcctcttgtggagtgcacttcccacatgtgccccgtaaaaatcaactggcacgtgaagcagaacagcaaggactactggagagtgaagatcaccatcacaaacctcaacttccgaatgaactacagcgagtggaacctggttgttcagcatccaaacttcgataacatcactcagttgttcggcctcaactacaaaccactcactccatatgggggtgacataaatgacacggcaatgttctggggtgtgaagtcctacaatgatgtgctgatgcaagacggtaagcttgggatggtgcagtcagagctccttctccgtaaagactcccggactttcacattcgaaaagggatgggccttcccacgccgggtgtacttcaatggtgataactgtgtcatgccagctcctgaaaattacccatcgttgccaatgcaagcctag

SEQ ID NO: 193 - protein, 425 aa, Sorghum bicolor
  misc_feature (55)..(219): Pfam Name: Phytochel_synth Pfam Description: Phytochelatin synthetase-like
  misc_feature: Ceres Annot ID no. 8632641
  misc_feature: Bit score of 808.3 for HMM based on sequences of Figure 3
  misc_feature: Functional Homolog Of SEQ ID NO. 117
MATGGRLAVTCSAAVLLAVALLISAPDAAEAYDSLDPNGNITIKWDVMQWTPDGYVAVVTMYNYQQFRHIGPPGWQLGWTWAKKEVIWSMVGAQATEQGDCSKFKGNIPHSCKKDPVIVDLLPSTPYDMQIANCCKAGVISTISQDPANAASSFQLSVGLSGSTTKTVKVPKNFTLRTPGPGYTCGRAIVGKPTIFFSADGRRATKALMTWNVTCTYSQFLAQKTPSCCVSLSSFYNNTTVNCPTCSCGCQNPSGSNCVNKGSPRLRSAIDGPGKWSGEPLVECTSHMCPVKINWHVKQNSKDYWRVKITITNLNFRMNYSEWNLVVQHPNFDNITQLFGLNYKPLTPYGGDINDTAMFWGVKSYNDVLMQDGKLGMVQSELLLRKDSRTFTFEKGWAFPRRVYFNGDNCVMPAPENYPSLPMQA

SEQ ID NO: 194 - protein, 465 aa, Physcomitrella patens subsp. patens
  misc_feature (69)..(234): Pfam Name: Phytochel_synth Pfam Description: Phytochelatin synthetase-like
  misc_feature: Public GI ID no. 168016456
  misc_feature: Bit score of 760.2 for HMM based on sequences of Figure 3
  misc_feature: Functional Homolog Of SEQ ID NO. 117
MPVSILFAFYGSIWLLPSNLSRIVSVFSEFVCCNNIYLSTVADAGYDPIDPEGNITIKWDVVEWTGDGYRAIVTMSNWQLYRHIQAPGWIMGWTWATKKEVIWNMVGAETREQGDCSKFTGNLPHCCKRTPEVIDLLPGVPYNQQTANCCRGGVLSSYMQDPKTSVASFQVIVGNTGNKNTTIKLPQNFTIMTPGPGYTCSSAKVVPKTKFLSPSGRRITEAFMTWTVKCSYTEQLAHKAATCCVSFSAFYNETIVPCEKCACDCPTNNTTPIITTNGADTNNQRCINRTKNNNLQQQPDMLYCTNDMCPVKIHWHIKLNYQEYWRVKITITNRDISRNYTLWNLVARHPNFKNFTESFSFSYKPLTAYGPTNDTAIFWGVKYYNDMLMQAGPSGNVQSEILFRKDSAFTLANGWGFPSHVLFNGDHCVLPHADHYPTLPSSSSTLRAATTTIALLVLFAVALLI

SEQ ID NO: 195 - protein, 425 aa, Oryza sativa subsp. indica
  misc_feature (51)..(217): Pfam Name: Phytochel_synth Pfam Description: Phytochelatin synthetase-like
  misc_feature: Public GI ID no. 125532513
  misc_feature: Bit score of 660.7 for HMM based on sequences of Figure 3
  misc_feature: Functional Homolog Of SEQ ID NO. 117
MAIGVGGCCAVLLAAALLFSSPATTYAYDSLDPNGNITIKWDVMQWTPDGYAAVVTLSNYQQFRHIQPPGWQLGWTWQQKEVIWSMYGAQAIEQGDCSMSKEGSNVPHSCKKHPTVVDLLPGTPIDLQIANCCKAGSLSAFSQDPANSAASFQIIVGHSGNSNETVRVPKNFSLMAPGPGYTCSRAMIVKPSRFLSPDGRRATQALMTWNVICTYSQFLAQKVPSCCVSLSSFDNDKTVDCPTCSCGCRNEKSTTGKCVKKNAPDLQSIIHGPGRWTWQPLLQCTSHMCPVKINWHLMLKDKEHYRVKITVTNLNYRMNFTEWNLVVQYHPILDITQISGFNYKSIQVGKINDTTMLWGVKPYYDLLMQAGPLGNVQGELIVRKDFRASSTSNNNKGRAFPVRVYFNGDNCVMPPPDAYPVSITA

SEQ ID NO: 196 - protein, 437 aa, Vitis vinifera
  misc_feature (50)..(213): Pfam Name: Phytochel_synth Pfam Description: Phytochelatin synthetase-like
  misc_feature: Public GI ID no. 157354382
  misc_feature: Bit score of 638.0 for HMM based on sequences of Figure 3
  misc_feature: Functional Homolog Of SEQ ID NO. 117
MFFSLFTFMSPSCKIQLNFLIGNADGYDPLDPNGNIAIKWDVLQWSSSSYDARVSIINYQLYRHIETPGWKLSWTWPGDEVIWDMWGALAHEQGNCSEFKGEQLPYCCEKTPLILDRGPGTPFNKQVANCCRDGLLTSMIQDPSKHGAMFQMNVGTASSNVSDMTMPRNFSLGVPGYTCGDPFQVPPSRFPEEGGRRWTQALMTWNVSCSYSQFLASTAPTCCVSLSAFYNSTIVPCPQCSCGCEGIPGTKCAKPGETPLLLPQGDGQQPDLVRCSRHMCPIRVHWHVKTSYREYWRVKITVTNLNLVKNYSAWNLVVLHPNLQSITQVFSFNYRSLNEHGTINDTGMFWGIQYYNELLLQAGESGNVQTEMLLHKDPGIFTFREGWAFPRKISFNGDQCVMPSPDEYPRLPNTGPSATPPSLCIILLLSLSVIVML

SEQ ID NO: 197 - DNA, 1296 bp, Populus balsamifera subsp. trichocarpa
  misc_feature: Ceres Annot ID no. 1481980
  misc_feature: Encodes the peptide sequence at SEQ ID NO. 198
atgggcatggtcttgattttgatcttcttcttcttctatctcattagctctatatcaccttcttatgggtttgacccacttgatccttatggcaacataaccatcaaatgggatcttcttctatcgaattccggtacaaataatctgatggtatcaatttacaacttccaacaatatcgccatgtggaaccaccaggctggaaattgaattgggcatggaaaggcaaagaggtgatatggtcaatgcagggagctgaggctactgagcaaggaaactgcactgaattcaaggaatcaacccttcctcattgttgtgagaaggagccattcattgtagaccttcttcccggaaccaattataatgctcaaacccaaaattgttgcaagggaggtgtactgtcatccatgaagcaagatccttccaagtatgttgctacttttcagatggctgtcggaggttctggtaccaattcccaatttaaaatgccggaaaatttcaaacttggagttccaggctatagttgtgggggtgcagttaaggtagaacccagcaggtacacaacagatggaggccggcgatggacacaggctcttgcgacatggaatgtgacctgcatgtactcccagagtttagcatcacctacaccaagatgttgtgtttccttgtctgcattctacaatcaaactattgtttcgtgccccagatgcagctgcggctgccaaggacaacctggaacaaaatgtgtaaagtatggtgagaccccaccattgctgaaacaaaatcaagatccaacacctgtagtaaggtgctcagagcatatgtgcccaataagggtgcattggcatctgaaagaaagttacaaacaatattggagggctaaaatgacagttacaaatttccacatcatgaaaaattattcagaatggaacttggtggtgctacatcccaacctgcaaagtctgacacaggttttcagcttcaactacgcacccctcaatcgatacggatatatcaatgatactgggatgttttgggggcttcctttttacaatgacattttactacaagaaggaaaggatgggaatttacagactgaaattttactacgcaaagatccagggatttttactttcagagaaggttggggtttccctagaaagattcaatttaatggtgatgaatgtgtcatgcctccaccggatgaatatccatcgctgcccaacaaggggcatagtgcctctgctaccacacctttcataattcttttctctttgtttctcgcatttatgctctaa

SEQ ID NO: 198 - protein, 429 aa, Populus balsamifera subsp. trichocarpa
  misc_feature (48)..(207): Pfam Name: Phytochel_synth Pfam Description: Phytochelatin synthetase-like
  misc_feature: Ceres Annot ID no. 1481980
  misc_feature: Bit score of 637.4 for HMM based on sequences of Figure 3
  misc_feature: Functional Homolog Of SEQ ID NO. 117
MVLILIFFFFYLISSISPSYGFDPLDPYGNITIKWDLLLSNSGTNNLMVSIYNFQQYRHVEPPGWKLNWAWKGKEVIWSMQGAEATEQGNCTEFKESTLPHCCEKEPFIVDLLPGTNYNAQTQNCCKGGVLSSMKQDPSKYVATFQMAVGGSGTNSQFKMPENFKLGVPGYSCGGAVKVEPSRYTTDGGRRWTQALATWNVTCMYSQSLASPTPRCCVSLSAFYNQTIVSCPRCSCGCQGQPGTKCVKYGETPPLLKQNQDPTPVVRCSEHMCPIRVHWHLKESYKQYWRAKMTVTNFHIMKNYSEWNLVVLHPNLQSLTQVFSFNYAPLNRYGYINDTGMFWGLPFYNDILLQEGKDGNLQTEILLRKDPGIFTFREGWGFPRKIQFNGDECVMPPPDEYPSLPNKGHSASATTPFIILFSLFLAFML

SEQ ID NO: 199 - DNA, 1263 bp, Populus balsamifera subsp. trichocarpa
  misc_feature: Ceres Annot ID no. 1535466
  misc_feature: Encodes the peptide sequence at SEQ ID NO. 200
atgggcatggtcttgattttgatcttcttcttcttctatctcattagctctatatcaccttcttatgggtttgacccacttgatccttatggcaacataaccatcaaatgggatcttcttctatcgaattccggtacaaataatctgatggtatcaatttacaacttccaacaatatcgccatgtggaaccaccaggctggaaattgaattgggcatggaaaggcaaagaggtgatatggtcaatgcagggagctgaggctactgagcaaggaaactgcactgaattcaaggaatcaacccttcctcattgttgtgagaaggagccattcattgtagaccttcttcccggaaccaattataatgctcaaacccaaaattgttgcaagggaggtgtactgtcatccatgaagcaagatccttccaagtatgttgctacttttcagatggctgtcggaggttctggtaccaattcccaatttaaaatgccggaaaatttcaaacttggagttccaggctatagttgtgggggtgcagttaaggtagaacccagcaggtacacaacagatggaggccggcgatggacacaggctcttgcgacatggaatgtgacctgcatgtactcccagagtttagcatcacctacaccaagatgttgtgtttccttgtctgcattctacaatcaaactattgtttcgtgccccagatgcagctgcggctgccaaggacaacctggaacaaaatgtgtaaagtatggtgagaccccaccattgctgaaacaaaatcaagatccaacacctgtagtaaggtgctcagagcatatgtgcccaataagggtgcattggcatctgaaagaaagttacaaacaatattggagggctaaaatgacagttacaaatttccacatcatgaaaaattattcagaatggaacttggtggtgctacatcccaacctgcaaagtctgacacaggttttcagcttcaactacgcacccctcaatcgatacggatatatcaatgatactgggatgttttgggggcttcctttttacaatgacattttactacaagaaggaaaggatgggaatttacagactgaaattttactacgcaaagatccagggatttttactttcagagaaggttggggtttccctagaaagattcaatttaatggtgatgaatgtgtcatgcctccaccggatgaatatccatcgctgcccaacaaggggcatagtgcctctaaggtattaccgacaaaataa

SEQ ID NO: 200 - protein, 418 aa, Populus balsamifera subsp. trichocarpa
  misc_feature (48)..(207): Pfam Name: Phytochel_synth Pfam Description: Phytochelatin synthetase-like
  misc_feature: Ceres Annot ID no. 1535466
  misc_feature: Bit score of 618.3 for HMM based on sequences of Figure 3
  misc_feature: Functional Homolog Of SEQ ID NO. 117
MVLILIFFFFYLISSISPSYGFDPLDPYGNITIKWDLLLSNSGTNNLMVSIYNFQQYRHVEPPGWKLNWAWKGKEVIWSMQGAEATEQGNCTEFKESTLPHCCEKEPFIVDLLPGTNYNAQTQNCCKGGVLSSMKQDPSKYVATFQMAVGGSGTNSQFKMPENFKLGVPGYSCGGAVKVEPSRYTTDGGRRWTQALATWNVTCMYSQSLASPTPRCCVSLSAFYNQTIVSCPRCSCGCQGQPGTKCVKYGETPPLLKQNQDPTPVVRCSEHMCPIRVHWHLKESYKQYWRAKMTVTNFHIMKNYSEWNLVVLHPNLQSLTQVFSFNYAPLNRYGYINDTGMFWGLPFYNDILLQEGKDGNLQTEILLRKDPGIFTFREGWGFPRKIQFNGDECVMPPPDEYPSLPNKGHSASKVLPTK

SEQ ID NO: 201 - DNA, 1365 bp, Arabidopsis thaliana
  misc_feature: Ceres Annot ID no. 1297618
  misc_feature: Encodes the peptide sequence at SEQ ID NO. 202
atgggtgcaatgctaaatcttttgctcgtcgttactgtcattctctgttcaatcttatcacccacacggtttatgattatgattgataaaatggttgcagatggatacgatcctcttgatccgttcggaaaaatcattatcaaatgggatcttcttttatcatcacctggccaacaccacgtacaagtaacgttagagaacatgcaagagtatcgacacgtggaaaagccagggtggaagcttagctggcattggctcaaccaagaagtgatatgggacatgaaaggagctgagacgacggagcaaggtaattgctctgcctttgcctccagcggtaaccttcctcactgctgtctcgagcgaccaaccatagtcgaccttcttcccggtgcttctctcaacgttcaagttgccaattgttgccgtggaggcgtcttgacttccatgtctcaggaccacgccaatcacgtctctgcttttcacatgacagttggaagctctcctgatggccctgaggagttcaatatgccttctaatttcgatataggggtcccgggttatagctgcgacaatgctacatccgtgtccccgactaagtttagtactgataagggccgtcgcaaaacacaagctctagcaacatgggaggcagtgtgtgtatactcgcagtttcggtcatcaccatcgccaaaatgctgcgtttcactctctgccttctactaccaaaacattgttccttgtcctacctgtagctgcggctgctcgagttcccattgtgtcaaggatggagagttgccgccatatcttgaacagaaacatgatccagatgaggaagtatcgcctgtcgtgaagtgttcggatcatatgtgtcccatccgcatccactggcatgtgaaagtgaactatagagagtattggagggttaagatcacagcaacaaatttcaacacaatgaagaattacactaattggaacttagtggtgcttcatccaaacttgaaaagcgtccaacaagtctttagctttaactacaaatctttgacaccatatcaaaacagcatcaatgacacagggatgttttggggagtccagttttataatgatgttttgcttcaagaaggaaagattgggaatgttcaaacagagttattgctgaagaaggatatgggaaatttcactttcagagaaggttgggctttcccaaggagaatcttgttcaatggtgatgaatgtgttatgccttctccagatgactttccaaggctgccaaaatctgctcattcctcttcgtcttcctctgctgttattagctctgtttcagtcgttttctgttttctccttcatcatcttcttctactagtttga

SEQ ID NO: 202 - protein, 454 aa, Arabidopsis thaliana
  misc_feature (59)..(223): Pfam Name: Phytochel_synth Pfam Description: Phytochelatin synthetase-like
  misc_feature: Ceres Annot ID no. 1297618
  misc_feature: Bit score of 629.4 for HMM based on sequences of Figure 3
  misc_feature: Functional Homolog Of SEQ ID NO. 117
MGAMLNLLLVVTVILCSILSPTRFMIMIDKMVADGYDPLDPFGKIIIKWDLLLSSPGQHHVQVTLENMQEYRHVEKPGWKLSWHWLNQEVIWDMKGAETTEQGNCSAFASSGNLPHCCLERPTIVDLLPGASLNVQVANCCRGGVLTSMSQDHANHVSAFHMTVGSSPDGPEEFNMPSNFDIGVPGYSCDNATSVSPTKFSTDKGRRKTQALATWEAVCVYSQFRSSPSPKCCVSLSAFYYQNIVPCPTCSCGCSSSHCVKDGELPPYLEQKHDPDEEVSPVVKCSDHMCPIRIHWHVKVNYREYWRVKITATNFNTMKNYTNWNLVVLHPNLKSVQQVFSFNYKSLTPYQNSINDTGMFWGVQFYNDVLLQEGKIGNVQTELLLKKDMGNFTFREGWAFPRRILFNGDECVMPSPDDFPRLPKSAHSSSSSSAVISSVSVVFCFLLHHLLLLV

SEQ ID NO: 203 - protein, 444 aa, Zea mays
  misc_feature (49)..(224): Pfam Name: Phytochel_synth Pfam Description: Phytochelatin synthetase-like
  misc_feature: Public GI ID no. 119040466
  misc_feature: Bit score of 590.5 for HMM based on sequences of Figure 3
  misc_feature: Functional Homolog Of SEQ ID NO. 117
MGRFVFVLLILMCCSSSRFTGAYDPIDPNGNITIVWDFQSLDVAGMTPYTVMVSIHNYQMYRHIERPGWRLSWSWAGKEVIWSTTGAETTEQGDCSRVGSGGSRPHCCQKRPVMVDLPPGTPYNMQVANCCRGGVLSSLVQSDLTSAAAFQMVVGEFALARDSGGKEPEKPWQFDMGVPGYTCSNATTVAPTRIKVDKNRYVQALQDRAELRAVTWQVTCSYSQYRASAAPSCCVSMTTFYSETIVDCPRCSCGCQGSPPSPQCVSVDQQQPWLPAVGDDEPSSAPIVWCSEHMCPIRVHWHVKTNYRKYWRVKVTVSNYNLARNYSDWNLVLQHPNLRSLTQLFSFNYRPLVEYGAYNDTGMFWGLRYYNEMLLQDGNVQSEMILEKESDFTYSGGWAFPRRVYFNGQECVMPPADQYPVLPNGASALRGHFCFLLLLFFVVV

SEQ ID NO: 204 - protein, 437 aa, Oryza sativa subsp. indica
  misc_feature (45)..(212): Pfam Name: Phytochel_synth Pfam Description: Phytochelatin synthetase-like
  misc_feature: Public GI ID no. 116310381
  misc_feature: Bit score of 603.0 for HMM based on sequences of Figure 3
  misc_feature: Functional Homolog Of SEQ ID NO. 117
MDVDQLILFVFVCCLSSRFADAYDPVDPNGNIIINWDFQSIENVYTVMVSVHNHQLYRHIEQPGWRLSWRWAGNEIIWGMTGAEATEQGDCHRIRGATRPHCCEKQPVIVDLPPGTPYNNQVSSCCRGGVLSSLTQNNRTSTAAFQMVVGGFRRATYHDGDRGPALPSRFGVGVPGYSCSNATKVNATRSPIGRHRHVQSLLTWQVTCTYSQFMEAASPTCCVSLSSFYNSTIVPCPRCSCGCPRSPTAPQCISEGEKPELPAGDGEAVAPVFRCTDHMCPVRVHWHVKISYREYWRVKVTITNYNQVKNYSDWNLVVQHPNLRSLTQLFSFNYQPLIEYGTLNDTGMFWGIQYYNEMMLQDGNVQTEMILKKDKSDFTFSGGWAFPRRVYFDGHECVMPPPDQYPLLPNGGPDSRVSAAQLIASSCLLLPFIFLIM

SEQ ID NO: 205 - DNA, 1329 bp, Sorghum bicolor
  misc_feature: Ceres Annot ID no. 8702104
  misc_feature: Encodes the peptide sequence at SEQ ID NO. 206
atggccgcgcaatccgcgattattgctgatcgttttcaccgcgtcgaatcagatgcctacgaccccgtagatccgaacgggaacatcacgatcaactgggattttcaggtcctcaacgtcaaggacatgtccccgtacacggtcatggtgagcatccacaactaccagatgtaccggcacatcgagcacccggggtggcggctgagctggaactggaccggcaaggaggtcatctggaacacggtgggcgcggagacgacggagcagggcgactgctcccgcgtcggcgccgccaacgcccgcccgcattgctgcctgaggcggcccgtcatggtggacctcccgcccggcaccccgtacaacaggcaggtcgccaactgctgccgcggcggcgtgctgtcgtccttcgtccagaacaatctgacgtccaccgccgcgttccagatggtcgtcggcgagttcgccctcgccaaggacgacggcggcggtagtatggagcccgagaagccgtggcatttcgacatcggcgtgccagggtacacctgcagcaacgccaccacggtagccccgaccagggtcaaggtcgacaagaaccgctacgaacaagtgctcctgacatggcaggtgacctgctcgtactctcagtaccgggcgtcgggggtgccgtcgtgctgcgtctccatgtcgacgttctacagcgagacgatcgtggattgcccgcgctgcagctgcgcctgccaagggtccccaacgccaacgtcgccacaatgcgtcagcgtcgaccaaccacggacaccagcgttgccggcgagcagcgacgacgagccggcggcgccgatcgtctggtgctcggagcacatgtgcccgatccgggtgcactggcacgtgaaggtgaactaccggcagtactggcgggtgaaagtgacggtgtccaactacaacctggtgaagaactacagcgactggaacctggtgctgcagcaccccaacctgcggagcctcacgcagctgttcagcttcaattacaagcctctcgtcgagtacggcagcttcaatgacacggggatgttctgggggttacgtttctacaacgagatgctgctgcaggacgggaacgtgcagacggagatgattctggagaaggagagcgacttcacctattccggcggctgggcgttcccgaggagggtctacttcaacggccaagagtgcgtcatgccgccggcggaccagtaccccaaactgcccaacggggcctcggaattgcgggggtcgtcgctgatcgccggcaattgcttgctgctgctattcttcttcgttctcgtgtag

SEQ ID NO: 206 - protein, 442 aa, Sorghum bicolor
  misc_feature (46)..(215): Pfam Name: Phytochel_synth Pfam Description: Phytochelatin synthetase-like
  misc_feature: Ceres Annot ID no. 8702104
  misc_feature: Bit score of 589.8 for HMM based on sequences of Figure 3
  misc_feature: Functional Homolog Of SEQ ID NO. 117
MAAQSAIIADRFHRVESDAYDPVDPNGNITINWDFQVLNVKDMSPYTVMVSIHNYQMYRHIEHPGWRLSWNWTGKEVIWNTVGAETTEQGDCSRVGAANARPHCCLRRPVMVDLPPGTPYNRQVANCCRGGVLSSFVQNNLTSTAAFQMVVGEFALAKDDGGGSMEPEKPWHFDIGVPGYTCSNATTVAPTRVKVDKNRYEQVLLTWQVTCSYSQYRASGVPSCCVSMSTFYSETIVDCPRCSCACQGSPTPTSPQCVSVDQPRTPALPASSDDEPAAPIVWCSEHMCPIRVHWHVKVNYRQYWRVKVTVSNYNLVKNYSDWNLVLQHPNLRSLTQLFSFNYKPLVEYGSFNDTGMFWGLRFYNEMLLQDGNVQTEMILEKESDFTYSGGWAFPRRVYFNGQECVMPPADQYPKLPNGASELRGSSLIAGNCLLLLFFFVLV

SEQ ID NO: 207 - protein, 433 aa, Vitis vinifera
  misc_feature (40)..(203): Pfam Name: Phytochel_synth Pfam Description: Phytochelatin synthetase-like
  misc_feature: Public GI ID no. 157340500
  misc_feature: Bit score of 535.8 for HMM based on sequences of Figure 3
  misc_feature: Functional Homolog Of SEQ ID NO. 117
MFFNKLFYSFSVFADCYDPLDPNGNITITFDTHKWTDDGYVARVTIQNYYQYRHVEKQGWKLGWTWAKDEVIWSMSGAFATQQGNCSSFIVQTPHSCLKNPVIVDLEPTAAPENMTEDCCHGGILSAWAIIPSNSFSSFEIMVGNLEGNTHGNKPLNLTLMAPGPGYTCSPIEDTDPTVSLVIGGRREIQVFRTWKSTCTYSTFLSNKVPVCCVSLSTFYSPTITTCPQCSCGCRDANPSTDSCIREGSSLSQLSSSGKLDIVQCTDHMCPIRVHWHVKNNYMSHWRVKLTISNYNLAKNYSDWNILVQHPGFSQNTTTYSFNSTALPTVGFADEIALFWGVTFYNNELLHADDKKLGSVTTEILLGKDSNSFTLNGGWAFPRRIYFNGENCEMPLPDTYPMLPNGSSTQKLTHPQFFLLLLCLTVKVLAIWL

SEQ ID NO: 208 - DNA, 576 bp, Arabidopsis thaliana
  misc_feature: Ceres Annot ID no. 847799
  misc_feature: Encodes the peptide sequence at SEQ ID NO. 209
atgtcttcggatcgtcacacaccgacgaaagatccaccggatcatccgtcttcttcctccaaccaccacaagcaaccacttcctcctcaaccgcagcaaccactcagccgctatgaatcgcagaaacgccgcgactggaacacgttcgtccaatacctaaaatcacaaaatccaccgttgatgatgtctcaattcgactacacgcacgtgctaagtttcctaaggtacttagatcagtttggtaagaccaaagtacatcatcaagcttgtgtcttcttcggacaaccggatccaccaggtccgtgcacgtgtcctctcaaacaagcttggggaagcctagatgctttgatcggacggctaagagctgcttacgaggaacacggtggcgggtcacctgatactaacccgtttgcaaacgggtcgatccgggttcacttgagggaagtgagagaatctcaagccaaggctcgtgggattccgtacaggaagaagaaaaggaggaagactaaaaacgaggtcgttgttgtcaagaaggatgttgcaaactcttcgactcctaatcagtcgttcacttga

SEQ ID NO: 209 - protein, 191 aa, Arabidopsis thaliana
  misc_feature (19)..(152): Pfam Name: DUF640 Pfam Description: Protein of unknown function (DUF640)
  misc_feature: Ceres Annot ID no. 847799
  misc_feature: Locus ID no. At4G18610
  misc_feature: Bit score of 353.9 for HMM based on sequences of Figure 10
MSSDRHTPTKDPPDHPSSSSNHHKQPLPPQPQQPLSRYESQKRRDWNTFVQYLKSQNPPLMMSQFDYTHVLSFLRYLDQFGKTKVHHQACVFFGQPDPPGPCTCPLKQAWGSLDALIGRLRAAYEEHGGGSPDTNPFANGSIRVHLREVRESQAKARGIPYRKKKRRKTKNEVVVVKKDVANSSTPNQSFT

SEQ ID NO: 210 - protein, 226 aa, Picea sitchensis
  misc_feature (25)..(157): Pfam Name: DUF640 Pfam Description: Protein of unknown function (DUF640)
  misc_feature: Public GI ID no. 116780542
  misc_feature: Bit score of 354.7 for HMM based on sequences of Figure 10
  misc_feature: Functional Homolog Of SEQ ID NO. 209
MSAEVVVGQGGSSATAAQLAPSSSSNGINEGSRELAASPAPSRYESQKRRDWNTFGQYLKNHRPPLALPRCSGAHVVEFLHYLDQFGKTKVHVPACPFFGHPHPPAPCACPLRQAWGSLDALIGRLRAAYEENGGKPESNPFGARAVRLYLREVRESQAKARGIAYEKRNASAPQFNSNNSSSNNMYSSTSTSTSTSTSTSSISSTSTSSKLRLTLCPTIPIQMSL

SEQ ID NO: 211 - DNA, 919 bp, Gossypium hirsutum
  misc_feature: Ceres Clone ID no. 1848017
  misc_feature: Encodes the peptide sequence at SEQ ID NO. 212
attcctttcacctcccctttccccagcccccttataatttcttcttgccttatttagcaaaagataattaatcaatctgcctcgatctcaacaatatgtcgagtgaaagagggaaggatatagcggaaggaccatcaagggttaatcccggtgatcaacagctgcccccaacacctagccgctatgagtcacagaagagaagggactggaatactttcgggcagtacctgaagaaccagaggcccccagttcctctttctcagtgcaactgcaaccatgtgctggacttccttcgatatctggatcagttcggaaagaccaaggttcacctgcagggatgcatgttctatggacagcctgagccgcctgctccttgcacatgcccccttaggcaagcctggggcagcctcgatgctctaattgggaggcttcgagctgcttatgaagagaatggagggtcacctgagaccaacccttttgccagcggtgctattcgggtttatctcagagaggtcagggagtgtcaagccaaggcaagggggatcccttataagaagaaaaagaagaagccgcatcaaggcaagggaggtgatgaatccagctccaccattcacttctcttaatctttggacgatgtatgggattacatgagaaaaagaatcaaatggaagggaatataatatgataaaatccatcgaagattcagctcagtttgggggtttcggccttctttattagtatttttctttttcggtatttggcaatagctataatgaagggatcagttgagtgtacataactctcttgatcagtttctactttgtttgcgttttctcttttcatgaatgtccattttatgtctaagcttcctacgcaaaacattcatatcgtattgataataattagtcattttagtcgt

SEQ ID NO: 212 - protein, 175 aa, Gossypium hirsutum
  misc_feature (11)..(143): Pfam Name: DUF640 Pfam Description: Protein of unknown function (DUF640)
  misc_feature: Ceres Clone ID no. 1848017
  misc_feature: Bit score of 373.1 for HMM based on sequences of Figure 10
  misc_feature: Functional Homolog Of SEQ ID NO. 209
MSSERGKDIAEGPSRVNPGDQQLPPTPSRYESQKRRDWNTFGQYLKNQRPPVPLSQCNCNHVLDFLRYLDQFGKTKVHLQGCMFYGQPEPPAPCTCPLRQAWGSLDALIGRLRAAYEENGGSPETNPFASGAIRVYLREVRECQAKARGIPYKKKKKKPHQGKGGDESSSTIHFS

SEQ ID NO: 213 - DNA, 534 bp, Populus balsamifera subsp. trichocarpa
  misc_feature: Ceres Annot ID no. 1466494
  misc_feature: Encodes the peptide sequence at SEQ ID NO. 214
atgtcaggtgatcaaaggcctaaagattctgctgagggctcttcacgatctggcggcgatcactaccagcctcaaccggctcctttgagcaggtatgagtcgcagaaacggcgagactggaacacttttgggcagtacttgaagaatcagagacccccagtttcactatctcagagtaattgcaaccacgtccttgatttccttcggtatctcgatcagtttggcaagactaaggtccatctacatggctgtgtcttttttggacaacctaatcctcctgctccttgtacctgccctctaaggcaagcttggggaagccttgatgccctaatcggacggcttcgagcagcttatgaggagcatggaggatctgcagagactaacccttttggaaatggagctattcgggtttatttgcgtgaagtgaaagagtgccaagctaaggcaagggggattccatacaagaagaaaacgaagaagaagactcaaataagggcaagaaatgaagcgaagcctcctatgcagtcagcttaa

SEQ ID NO: 214 - protein, 177 aa, Populus balsamifera subsp. trichocarpa
  misc_feature (13)..(145): Pfam Name: DUF640 Pfam Description: Protein of unknown function (DUF640)
  misc_feature: Ceres Annot ID no. 1466494
  misc_feature: Bit score of 368.7 for HMM based on sequences of Figure 10
  misc_feature: Functional Homolog Of SEQ ID NO. 209
MSGDQRPKDSAEGSSRSGGDHYQPQPAPLSRYESQKRRDWNTFGQYLKNQRPPVSLSQSNCNHVLDFLRYLDQFGKTKVHLHGCVFFGQPNPPAPCTCPLRQAWGSLDALIGRLRAAYEEHGGSAETNPFGNGAIRVYLREVKECQAKARGIPYKKKTKKKTQIRARNEAKPPMQSA

SEQ ID NO: 215 - DNA, 534 bp, Populus balsamifera subsp. trichocarpa
  misc_feature: Ceres Annot ID no. 1449022
  misc_feature: Encodes the peptide sequence at SEQ ID NO. 216
atgtcaggtgatcaaaggcctaaagattctgctgaaggctcttcgcgatctggaggcgatcaccaccagcttcaatcagctcctttgagccggtatgagtcgcagaaacggcgagactggaacactttcgggcagtacttgaagaatcagagacccccagtttcattatctcagtgtaattgcaatcatgtgcttgatttccttcggtatcttgatcagtttggcaagactaaggttcatctacatgggtgcgtcttctttggacaacctgatcctcctgctccttgtacatgccctctaaggcaagcttgggggagccttgatgccctaatcggacgccttcgagcagcttttgaggagcatggaggatcagcggagactaacccttttggaaatggagctattcgggtttatttgcgtgaagtgaaagagtgtcaagctaaggcaagagggattccttacaagaagaagaagaagaagaagactcaaataaggccaagagacgaagcaaagccttcgatgcagacagcttaa

SEQ ID NO: 216 - protein, 177 aa, Populus balsamifera subsp. trichocarpa
  misc_feature (13)..(145): Pfam Name: DUF640 Pfam Description: Protein of unknown function (DUF640)
  misc_feature: Ceres Annot ID no. 1449022
  misc_feature: Bit score of 365.2 for HMM based on sequences of Figure 10
  misc_feature: Functional Homolog Of SEQ ID NO. 209
MSGDQRPKDSAEGSSRSGGDHHQLQSAPLSRYESQKRRDWNTFGQYLKNQRPPVSLSQCNCNHVLDFLRYLDQFGKTKVHLHGCVFFGQPDPPAPCTCPLRQAWGSLDALIGRLRAAFEEHGGSAETNPFGNGAIRVYLREVKECQAKARGIPYKKKKKKKTQIRPRDEAKPSMQTA

SEQ ID NO: 217 - DNA, 531 bp, Populus balsamifera subsp. trichocarpa
  misc_feature: Ceres Annot ID no. 1482911
  misc_feature: Encodes the peptide sequence at SEQ ID NO. 218
atgtcaagcaataaagggaaagatgtagcggaaggttcatcaagagctgttgctatggctcccgatcagcaaaatccacctcccttgagtcgatacgaatcgcagaagaggcgcgattggaacacctttggtcagtacttgaggaaccagagacccccagttgcattatcacagtgcaacgcaaatcatgtgcttgaatttcttcgatacctcgatcaatttggcaagactaaggtgcacttacaagggtgtgtcttttttggacaacctgagccgccagggccctgtacttgcccacttaagcaagcctggggtagccttgatgcactcatcggccggcttagggctgcttatgaagaaaatggtggcttgcctgagacaaacccttttgcaagtggtgctattagagtatatctacgtgaagtgagggactctcaggccaaggcaagaggaattccttataagaagaagaagaagaagaggaatccgatgaaagctaacgatgagagctcaagctttcatatgcagtaa

SEQ ID NO: 218 - protein, 158 aa, Populus balsamifera subsp. trichocarpa
  misc_feature (1)..(127): Pfam Name: DUF640 Pfam Description: Protein of unknown function (DUF640)
  misc_feature: Ceres Annot ID no. 1482911
  misc_feature: Bit score of 378.4 for HMM based on sequences of Figure 10
  misc_feature: Functional Homolog Of SEQ ID NO. 209
MAPDQQNPPPLSRYESQKRRDWNTFGQYLRNQRPPVALSQCNANHVLEFLRYLDQFGKTKVHLQGCVFFGQPEPPGPCTCPLKQAWGSLDALIGRLRAAYEENGGLPETNPFASGAIRVYLREVRDSQAKARGIPYKKKKKKRNPMKANDESSSFHMQ

SEQ ID NO: 219 - DNA, 799 bp, Brassica napus
  misc_feature: Ceres Clone ID no. 1118987
  misc_feature: Encodes the peptide sequence at SEQ ID NO. 220
aaattctcgattcgcttatattctcaaaaccaacgctaaataaaaacactctcaaagaaaaacaaaaaaaaaaccctagttttgatggaatcgactgattcggggtcacaacaacatggaggtgacccaggtccgtcctccgtaacgccctcttcacctccggcgacgccgcctagcaggtacgagtcgcaaaaacgacgtgactggaacacgttcttgcagtacctcaagaaccacaagccgcctctcgcgttatcacgatgtagcggagcgcacgtgatcgagttcctcaagtacctagatcagttcggtaagaccaaagtccacgtggcgacctgcccttacttcggacatcagcagcctccctctccttgcgcttgtcctctcaagcaagcctggggatctctcgatgctctgatcggacggttgagagctgcgtacgaggagcacggtgggaggcctgattccaaccctttcgccgcacgtgcggtcaggatttacttgagagaagtcagagaaagtcaagccaaggcacgtgggattccatacgagaagaagaaacggaaacgggcaccaactgtcactaccgctagaattgacgttgctccgtcgagacaaagtgaaggaggtggtggttgtaacgacagtgatccgtctgtcgccgaagctgtaccgccttaaattaaattattatatcatattaattagttttcttgttatattaagcatggaactcacacctttcgtactataatgtattttatttttctatatgaactattaagagttttcttttgcc

SEQ ID NO: 220 - protein, 198 aa, Brassica napus
  misc_feature (13)..(146): Pfam Name: DUF640 Pfam Description: Protein of unknown function (DUF640)
  misc_feature: Ceres Clone ID no. 1118987
  misc_feature: Bit score of 367.1 for HMM based on sequences of Figure 10
  misc_feature: Functional Homolog Of SEQ ID NO. 209
MESTDSGSQQHGGDPGPSSVTPSSPPATPPSRYESQKRRDWNTFLQYLKNHKPPLALSRCSGAHVIEFLKYLDQFGKTKVHVATCPYFGHQQPPSPCACPLKQAWGSLDALIGRLRAAYEEHGGRPDSNPFAARAVRIYLREVRESQAKARGIPYEKKKRKRAPTVTTARIDVAPSRQSEGGGGCNDSDPSVAEAVPP

SEQ ID NO: 221 - DNA, 828 bp, Brassica napus
  misc_feature: Ceres Clone ID no. 1073674
  misc_feature: Encodes the peptide sequence at SEQ ID NO. 222
acactctttctctcaatttctctctcttttaaaacactaatcactaaaatcttgattcactatatcgtcaaaaccaacgctaaatcaattaaactctctcaaagaaaacaagacaaagccctacttttgatggattcagggtcacaacgaccggggcctgttagcgaaggcgatccgggtccgtccatcgtaaccccctcttcaccgcctgcgacgcctagcaggtacgagtcgcagaaacgacgtgactggaccacgttcttgcagtacctcaagaaccacaagccgcctctttccttgtcacggtgtagcggagcacatgccatcgagttcctcaagtacttagatcagttcggtaagaccaaagtccacgtggcggcatgtccttactttggccatcagcaacctccgtctccttgcgcttgtcctctcaagcaagcctgggggtctctcgatgccctgatcggacggttgagagcagcctacgaagagaacggtggacggcccgagtcgaacccgttcgcggcacgtgcggttaggatttacttgagggaagtcagagaaagtcaagccaaggcccgtgggagaccctacgagaaaaagaaacggaaacggccaacaactgttaccaccgtgagagttgacgttgcttcgtcgagacaaagtgaaggagatggttgtaacatcggtgatccgtcgtatgtggccgaggctgtacctccttaattaagttattattattgtcatgatatattaaatacattatatatgtctggaactcacatcaccttcttgagttaactattgaaaatatttttgttctagttc

SEQ ID NO: 222 - protein, 198 aa, Brassica napus
  misc_feature (14)..(146): Pfam Name: DUF640 Pfam Description: Protein of unknown function (DUF640)
  misc_feature: Ceres Clone ID no. 1073674
  misc_feature: Bit score of 353.3 for HMM based on sequences of Figure 10
  misc_feature: Functional Homolog Of SEQ ID NO. 209
MDSGSQRPGPVSEGDPGPSIVTPSSPPATPSRYESQKRRDWTTFLQYLKNHKPPLSLSRCSGAHAIEFLKYLDQFGKTKVHVAACPYFGHQQPPSPCACPLKQAWGSLDALIGRLRAAYEENGGRPESNPFAARAVRIYLREVRESQAKARGRPYEKKKRKRPTTVTTVRVDVASSRQSEGDGCNIGDPSYVAEAVPP

SEQ ID NO: 223 - DNA, 939 bp, Brassica napus
  misc_feature: Ceres Clone ID no. 1084747
  misc_feature: Encodes the peptide sequence at SEQ ID NO. 224
acactctttctctcattttctctctcttttaaaacactaatcactaaaatcttgattcactgtatcctcaaaaccaactctaaatcaaactctctcaaagaaaacaagccaaagccctactttggatggattcagggtcacaacgaccggggcctgtcagcgaaggcgatccgggtccgtccatcgtaaccccctcttcaccgcctgcggcgcctagcaggtacgagtcacagaaacgacgtgactggaccacgttcttacagtacctcaagaaccacaagccgcctctttccttgtcacggtgtagcggggcacatgccatcgagttcctcaagtacttagatcagttcggtaagaccaaagtccacgtggcggcgtgtccttacttcggccatcagcaacctccgtctccttgcgcttgtcctctcaagcaagcctgggggtctctcgatgccctgatcggacggctgagagcagcctatgaggagaacggtggacggcccgagtcgaacccgttcgcggcacgtgcggtcaggatttacttgagggaagtcagagaaagtcaagccaaggcccgtgggagaccctacgagaaaaagaaacggaaacggccaacaactgttaccaccgtgagagttgacgttgctccgtcgagacaaagtgaaggagatggttgtaacatcggtgatccgtcgtctctggccgaggctgtacctccttaattacgttattattattgtcatgatatattaaatacattatacatgtctggaactcacatcaccaaaaaaaaactcacatcaccttcttgagttaactatcgaaaatatatttttgttctagttcagttgatctttgatgaattacgttcttgaatttttcttttaattcttatgaattccacacatttttaaggactaattaacgaggttttcattc

SEQ ID NO: 224 - protein, 198 aa, Brassica napus
  misc_feature (14)..(146): Pfam Name: DUF640 Pfam Description: Protein of unknown function (DUF640)
  misc_feature: Ceres Clone ID no. 1084747
  misc_feature: Bit score of 353.0 for HMM based on sequences of Figure 10
  misc_feature: Functional Homolog Of SEQ ID NO. 209
MDSGSQRPGPVSEGDPGPSIVTPSSPPAAPSRYESQKRRDWTTFLQYLKNHKPPLSLSRCSGAHAIEFLKYLDQFGKTKVHVAACPYFGHQQPPSPCACPLKQAWGSLDALIGRLRAAYEENGGRPESNPFAARAVRIYLREVRESQAKARGRPYEKKKRKRPTTVTTVRVDVAPSRQSEGDGCNIGDPSSLAEAVPP

SEQ ID NO: 225 - DNA, 1036 bp, Glycine max
  misc_feature: Ceres Clone ID no. 536345
  misc_feature: Encodes the peptide sequence at SEQ ID NO. 226
ggtctatttgtctttctcttccttccccaccaaaatttccctttcacacttcacaaaaaagaaatactaaatgatttgtcagtagcagcaaacatgtccagcaagggaaaggagatagcagaaggatcatcaacaacaacaacagcaacaagatcctctcatggaggtgacgatcatcatcatcaccacaatcagcagcagcagcaacaacaacaacagttaccactgagtcgctatgagtctcagaagagaagggattggaacacttttggacagtacctgaggaaccaaaggcctccagtggcactttctcagtgcagctccaaccatgttcttgagttccttcgctacttggaccagtttgggaagaccaaagtgcactcacaagggtgcttgttctttgggcaaactgagccgccaggaccctgcacttgccctctcagacaagcttgggggagccttgatgcactcattggaagattgagagctgcatatgaagaaaatggaggccttcctgagaccaatccttttgcaagtggcaccataagagtctatcttagagaggtgagagattctcaggctaaggctagaggaatcccttataagaagaaaaagaagaagaggaatgttatcaggcccaacggagacacctcctcctcaaacttgcctatgcagtaataataattaaagaggagcatgtgatatctctaaattgtttcaaagtcgtgaatctgttgctaggccttggatataacttcagctgcaaacttggaattctggttataattgactatctggacatatccctgggtcaactttaacccttcggtggtctttatgtgtcaaggagtgtattttgttatttcgaatgagagtttagaatgaagttgacgaaaagtttaacattgggggtaagtccctgtattatatttacttatatatatttacactatcaagcatattatatagtcatgaaaataatgtgtatgatattgcatatggtattggtatcgtttgattaattctctgggaagct

SEQ ID NO: 226 - protein, 194 aa, Glycine max
  misc_feature (29)..(161): Pfam Name: DUF640 Pfam Description: Protein of unknown function (DUF640)
  misc_feature: Ceres Clone ID no. 536345
  misc_feature: Bit score of 370.0 for HMM based on sequences of Figure 10
  misc_feature: Functional Homolog Of SEQ ID NO. 209
MSSKGKEIAEGSSTTTTATRSSHGGDDHHHHHNQQQQQQQQQLPLSRYESQKRRDWNTFGQYLRNQRPPVALSQCSSNHVLEFLRYLDQFGKTKVHSQGCLFFGQTEPPGPCTCPLRQAWGSLDALIGRLRAAYEENGGLPETNPFASGTIRVYLREVRDSQAKARGIPYKKKKKKRNVIRPNGDTSSSNLPMQ

SEQ ID NO: 227 - DNA, 1127 bp, Glycine max
  misc_feature: Ceres Clone ID no. 1650005
  misc_feature: Encodes the peptide sequence at SEQ ID NO. 228
attccttctctcactcaccctcttatttcttcccaaaactccatatacatccatatctctatagccattaattcttctaccatagcacacagttaccaaaccaaaacatgtctactcaaattcaaaatggttcttcctcctcatcacaacaaccactgagtcgctatgagtcacaaaagcggcgagactggaacacctttggacagtacctgaggaatcagagtcccccagttccactctctcagtgcaacttcaaccatgtgttggatttccttcggtacctcgatcaatttgggaaaaccaaggtccacttgcacggttgcatcttctttggccagcccacccctcctgcaccctgtgcctgccctctcaggcaagcatggggtagcctcgatgccctcataggccggcttcgcgctgcctatgaggagcatggcggatcgccagagactaatccctttggaggaggagccattcgggtgtacctgcgtgaggtcaaggagtgtcaggcaaaggctagagggatcccatataagaagaagaagaagaagagaaacccaattctcaaggggactcaaagagctaaagatatcgagcaacaagcttcttgagatgatatatatctatatatatatatatatatatatgatatgaacgggccatatacgagcgagttaattggatatagcagatttggcactttgaaaaaagagcatctcagctgcttggaccaaaaattgttacagaaaatcagtgatatttcactaagtagttcagaacagaaaaatccttttaggcccatttactcgcagtaaatcttaaaatgcatgttagagatgtacaaccttgtaacttcttctaacatatgagacctctactccaaaatagaaacaacaagaatggctggctttacattcttgcagtagtttttccttatagtactttcaagcattatcaactacgcaaatatatctaggcattatattgaaagagttggaatttacattaatttggattaattagtacgttgtagtatgatgtcttaatcttgatgtgaacttcttggatttcaacttgatgcatatactgctgaaaatattcaatgtaaacttaattagcagagttgc

SEQ ID NO: 228 - protein, 167 aa, Glycine max
  misc_feature (1)..(133): Pfam Name: DUF640 Pfam Description: Protein of unknown function (DUF640)
  misc_feature: Ceres Clone ID no. 1650005
  misc_feature: Bit score of 358.8 for HMM based on sequences of Figure 10
  misc_feature: Functional Homolog Of SEQ ID NO. 209
MSTQIQNGSSSSSQQPLSRYESQKRRDWNTFGQYLRNQSPPVPLSQCNFNHVLDFLRYLDQFGKTKVHLHGCIFFGQPTPPAPCACPLRQAWGSLDALIGRLRAAYEEHGGSPETNPFGGGAIRVYLREVKECQAKARGIPYKKKKKKRNPILKGTQRAKDIEQQAS

SEQ ID NO: 229 - DNA, 618 bp, Solanum lycopersicum
  misc_feature: Ceres Annot ID no. 8453882
  misc_feature: Encodes the peptide sequence at SEQ ID NO. 230
atgtcaaatgatcaaataataatcgaaggcgaaggaggaggaggaggaggagaaggatcatcatcgagatccaaaaccactatacttatagcaccatctgacgatcatcatcatcatcatcagctaccaccagtaccacctcaactgagtagatatgagtctcagaaacgtcgcgattggaatacttttggacaatacttgaaaaatcaaaggccacctgttcctttatcccagtgtaactataaccacgtgctagagtttctccgatacctagatcaatttggaaaaactaaggtacatttacatggttgccctttttttggtcaaccagagcctccagggccttgtacttgtcctcttagacaagcatggggaagtcttgatgcacttattggtaggcttagagctgcctatgaagaaaatggtggcttacctgagaataatccattcgcgagtggagctatacgcgtttatcttagagaggtaagagattttcaagctaaagcaagaggaatttgttataagaagaagaagaagaagaggaaaatgcaaaacaaacctacttctagtaatgctcatgagccaactacaactacctttcaattccaatcttcttga

SEQ ID NO: 230 - protein, 205 aa, Solanum lycopersicum
  misc_feature (33)..(165): Pfam Name: DUF640 Pfam Description: Protein of unknown function (DUF640)
  misc_feature: Ceres Annot ID no. 8453882
  misc_feature: Bit score of 374.4 for HMM based on sequences of Figure 10
  misc_feature: Functional Homolog Of SEQ ID NO. 209
MSNDQIIIEGEGGGGGGEGSSSRSKTTILIAPSDDHHHHHQLPPVPPQLSRYESQKRRDWNTFGQYLKNQRPPVPLSQCNYNHVLEFLRYLDQFGKTKVHLHGCPFFGQPEPPGPCTCPLRQAWGSLDALIGRLRAAYEENGGLPENNPFASGAIRVYLREVRDFQAKARGICYKKKKKKRKMQNKPTSSNAHEPTTTTFQFQSS

SEQ ID NO: 231 - DNA, 639 bp, Oryza sativa
  misc_feature: Ceres Annot ID no. 1373087
  misc_feature: Encodes the peptide sequence at SEQ ID NO. 232
atggatccgtctggccccggtccgtcctctgcggcggctggcggcgcgccggccgtggcggcggcgccgcagccgccggcgcagctgagcaggtacgagtcgcagaagcggagggactggaacacgttcctgcagtacctgcggaaccaccggccgccgctgacgctggcgcggtgcagcggcgcgcacgtgatcgagttcctgaggtacctggaccagttcgggaagaccaaggtgcacgcgtcggggtgcgccttctacggccagcccagcccgccggggccgtgcccgtgcccgctgcgtcaggcgtggggatccctcgacgcgctcatcggccgcctccgcgccgcgtacgaggagagcggcggcacgcccgagtccaacccgttcgccgcgcgcgccgtccggatctacctccgcgaggtgcgggactcgcaggccaaggcgcgcggcatcccgtacgagaagaagaagcgcaagcgctcgcaggcggcgcagcccgccggcgtcgagccgtccggctcgtcttctgctgcagctgcagctgccggtggtggagacgcgggcagcggtggcggtgcagctgctactaccacagctcaacctggagggagtggcactgcaccaagcgcctcctga

SEQ ID NO: 232 - protein, 212 aa, Oryza sativa
  misc_feature (13)..(145): Pfam Name: DUF640 Pfam Description: Protein of unknown function (DUF640)
  misc_feature: Ceres Annot ID no. 1373087
  misc_feature: Bit score of 377.4 for HMM based on sequences of Figure 10
  misc_feature: Functional Homolog Of SEQ ID NO. 209
MDPSGPGPSSAAAGGAPAVAAAPQPPAQLSRYESQKRRDWNTFLQYLRNHRPPLTLARCSGAHVIEFLRYLDQFGKTKVHASGCAFYGQPSPPGPCPCPLRQAWGSLDALIGRLRAAYEESGGTPESNPFAARAVRIYLREVRDSQAKARGIPYEKKKRKRSQAAQPAGVEPSGSSSAAAAAAGGGDAGSGGGAAATTTAQPGGSGTAPSAS

SEQ ID NO: 233 - DNA, 648 bp, Sorghum bicolor
  misc_feature: Ceres Annot ID no. 8669372
  misc_feature: Encodes the peptide sequence at SEQ ID NO. 234
atggatccctccgggcctggcccgtcgtcggtcatgggggcagcaggcggcggcgaggcaccggccgtggcgccgccgcgtccggcgcagctgagcaggtacgagtcgcagaagcggagggactggaacacgttcctgcagtacctgcgaaaccaccggccgccgctgacgctggcgcggtgcagcggcgcgcacgtgatcgagttcctccggtacctggaccagttcggcaagaccaaggtgcacgccgccgggtgcgcctactacggccagccggcaccgccggggccctgcccgtgcccgctgcgccaggcgtggggctccctcgacgcgctcatcggccgcctgcgcgcggcgtacgaggagagcggcggcacgcccgagtccaaccccttcgccgcgcgcgccgtgcggatctacctccgcgaggtgcgcgactcgcaggccaaggcgcgcggcatcccctacgagaagaagaagcgcaagcgcgcgcagcagcagcaggccgccgccgccgcggatcctgcttcgacgagctcgtccgctgctgctgccggcgggagcgggactagcggcagggctgctgctgcagctgccgcgtccgccgctcaggccggagggagtagcgctgcaccgagcaccacttga

SEQ ID NO: 234 - protein, 215 aa, Sorghum bicolor
  misc_feature (15)..(147): Pfam Name: DUF640 Pfam Description: Protein of unknown function (DUF640)
  misc_feature: Ceres Annot ID no. 8669372
  misc_feature: Bit score of 377.8 for HMM based on sequences of Figure 10
  misc_feature: Functional Homolog Of SEQ ID NO. 209
MDPSGPGPSSVMGAAGGGEAPAVAPPRPAQLSRYESQKRRDWNTFLQYLRNHRPPLTLARCSGAHVIEFLRYLDQFGKTKVHAAGCAYYGQPAPPGPCPCPLRQAWGSLDALIGRLRAAYEESGGTPESNPFAARAVRIYLREVRDSQAKARGIPYEKKKRKRAQQQQAAAAADPASTSSSAAAAGGSGTSGRAAAAAAASAAQAGGSSAAPSTT

SEQ ID NO: 235 - DNA, 1184 bp, Triticum aestivum
  misc_feature: Ceres Clone ID no. 1048839
  misc_feature: Encodes the peptide sequence at SEQ ID NO. 236
attctctctctctctctcgctgcctggccaggtagcttctctctctcctccacgctcctgccgacaaaaacaagaaacgacgtagcacggtagcagcaaagagaaagagagagagaccactggtagccaagggtgggagagaagcaggagtgccgctgccgatcgaccatggagccgggccccgacgcgcctcgcggcgagggagcgagcgcgccggaggagtctggaccgtcctcatcctcggtggccgtggagaaagctgaagagccacaggcacaagcgcagccgccggaaggaggaggccagcaagtcgcactgcaggagcacctgcagccgcagccgctgtcgcagcagccgccggtgccagcggggctgagccgctacgagtcgcagaagcgccgcgactggaacacgttcctgcagtacctgcgcaaccacaagccgccgctgacactcgcgcggtgcagcggcgcgcacgtcatcgagttcctcaagtacctggaccagttcggcaagaccaaggtgcacgccgacggctgcgcctacttcggccagcccaacccgccggctccgtgcgcgtgcccgctccgacaggcatggggcagcctcgacgcgctcattggccgcctgcgcgccgcctacgaggagtccggcggccgccctgagtccaaccccttcgccgcgcgcgccgtgcgcatctatctgcgcgaggtgcgcgaggcgcaggccaaggcgcgcgggataccctacgagaagaagaagcgcaagcgcggcagcacgtccgcccccgcggcgccgcctcccgttgtcaccgccgcggaggcggcagcgacctccggaggcggcgaggacgacgaggacgagccgtcacagtccgctgagcaacagcacacaacgccagcgtctcctccgactagaattagtagcgccggcgctactagtaccaccgcagcggcggcagccacaacgacgacgacgacaacgagagggaaggagaaggaagcggcagaaggatcagcgtgataagtgtagaccatcaaattacccttttgattattccatcgcatccaaattctaatctctgcaccatcataattttagttgtttgttattataattactgtgctgttatgatttgttggatatatatatatatataagagagaggtctaagtagttcgtac

SEQ ID NO: 236 - protein, 284 aa, Triticum aestivum
  misc_feature (51)..(185): Pfam Name: DUF640 Pfam Description: Protein of unknown function (DUF640)
  misc_feature: Ceres Clone ID no. 1048839
  misc_feature: Bit score of 373.6 for HMM based on sequences of Figure 10
  misc_feature: Functional Homolog Of SEQ ID NO. 209
MEPGPDAPRGEGASAPEESGPSSSSVAVEKAEEPQAQAQPPEGGGQQVALQEHLQPQPLSQQPPVPAGLSRYESQKRRDWNTFLQYLRNHKPPLTLARCSGAHVIEFLKYLDQFGKTKVHADGCAYFGQPNPPAPCACPLRQAWGSLDALIGRLRAAYEESGGRPESNPFAARAVRIYLREVREAQAKARGIPYEKKKRKRGSTSAPAAPPPVVTAAEAAATSGGGEDDEDEPSQSAEQQHTTPASPPTRISSAGATSTTAAAAATTTTTTTRGKEKEAAEGSA

SEQ ID NO: 237 - DNA, 1203 bp, Zea mays
  misc_feature: Ceres Clone ID no. 281322
  misc_feature: Encodes the peptide sequence at SEQ ID NO. 238
agcttgattctctctggctggtacgcggtagcctcgctctctctcctacctacacggctacacttaaacggcagcaggcacctgcaggcagggagagctgctaacggaccgatcggggagctgctggccatggagcctggtccggatgcgcccgctggtggtggtggcggaggaggaaccagtattagtgagccagcagaggccgggccgtcgccgtcgtcgtcctcggccgccgcagcagcctcgtcgtcgagccggcagcaggcagagcaggaagcacagcagcaacaaggagcacagcagagggaacagccagcagtaagggcccaggcgcagccgcagccgcagccgcatcagcagcagcctccggcggggctcagccggtacgagtcgcagaagcgccgggactggaacacgttcctgcagtacctgcggaaccacaagccgccgctgacgctggcacgctgcagcggcgcacacgtcatcgagttcctccgctacctggaccagttcggcaagacgaaggtgcacgctgagggctgcgcctacttcgggcagccgaacccgccggcgccctgcacgtgcccgctgcgccaggcctggggtagcctcgacgcgctcatcggccgcctccgcgccgcgtacgaggagtccggcggccgccccgagtccaacccgttcgcggccaaggccgtgcgcatctacctccgcgacgtgcgggaggcgcaggccaaggcccgcggcatcccgtacgagaagaagaagcggaagcgcgggagcgccgccgcgcctccggtcgcgccgcctcctgttgtgactgcagaggccgccgggacgtcgtcaggggccggcggtggtgatgacgaggacgacgacgaaccaccgccatctgcagatgaaccacgacgacagcagaccgccgcgccgactcctcctcctcctgcaagtatgatttccagcactagtgcaagcagtagcagtgtcgccccagtcacgacgacgacgacgacaagcaaggagaaagaaggatccgcgccaagctcgtgataagtttgtagatcatctactagccttctgattcaattctatcatcgccggcctccaaattataatcccaaccgcctccatcttaaatttttagttgctcactattactatatattgttattgtttactggcatatataagagagaggtctaaggg

SEQ ID NO: 238 - protein, 305 aa, Zea mays
  misc_feature (67)..(199): Pfam Name: DUF640 Pfam Description: Protein of unknown function (DUF640)
  misc_feature: Ceres Clone ID no. 281322
  misc_feature: Bit score of 372.9 for HMM based on sequences of Figure 10
  misc_feature: Functional Homolog Of SEQ ID NO. 209
MEPGPDAPAGGGGGGGTSISEPAEAGPSPSSSSAAAAASSSSRQQAEQEAQQQQGAQQREQPAVRAQAQPQPQPHQQQPPAGLSRYESQKRRDWNTFLQYLRNHKPPLTLARCSGAHVIEFLRYLDQFGKTKVHAEGCAYFGQPNPPAPCTCPLRQAWGSLDALIGRLRAAYEESGGRPESNPFAAKAVRIYLRDVREAQAKARGIPYEKKKRKRGSAAAPPVAPPPVVTAEAAGTSSGAGGGDDEDDDEPPPSADEPRRQQTAAPTPPPPASMISSTSASSSSVAPVTTTTTTSKEKEGSAPSS

SEQ ID NO: 239 - protein, 175 aa, Vitis vinifera
  misc_feature (11)..(143): Pfam Name: DUF640 Pfam Description: Protein of unknown function (DUF640)
  misc_feature: Public GI ID no. 147795605
  misc_feature: Bit score of 380.4 for HMM based on sequences of Figure 10
  misc_feature: Functional Homolog Of SEQ ID NO. 209
  misc_feature (175)..(175): Xaa is any aa, unknown, or other
MSNDRKRDSAEGSSRSTGEPQQQPQPLSRYESQKRRDWNTFGQYLKNQRPPVSLAQCSCNHVLEFLRYLDQFGKTKVHLHGCVFFGQPDPPAPCTCPLRQAWGSLDALIGRLRAAYEEHGGSPETNPFGNGAIRVYLREVRDCQSKARGIPYKKKKKKKNQIKPNNEAKSSKQSX

SEQ ID NO: 240 - DNA, 1062 bp, Panicum virgatum
  misc_feature: Ceres Clone ID no. 2004419
  misc_feature: Encodes the peptide sequence at SEQ ID NO. 241
actcatcgcgatcgatcgctgctagctagctcccagctgcgattctgatccttcgtgctccctcagttgtcgtcgtcgctggctcgctcgcttgcttgccagctctctctctcatagtagctagctgcttgcatggatccgtccgggcccggcccgtcgccggtcgttggcggaggaggcggcggtgacgcgccggccgtggtgccgcagcagcggccggcgcagctgagcaggtacgagtcgcagaagcggcgggactggaacacgttcctgcagtacctgcggaaccaccgcccgccgctgacgctggcgcggtgcagcggcgcgcacgtgatcgagttcctcaggtacctggaccagttcggcaagaccaaggtgcacgccgccgggtgcgcctactacggccagcccgcgccgccggggccctgcccgtgcccactgcggcaggcctggggctccctcgacgcgctcatcggccgcctgcgcgccgcgtacgaggagagcggcggcacgcccgagtccaaccccttcgccgcgcgcgccgtgcggatctacctccgcgaggtgcgcgactcgcaggccaaggcgcgcggcatcccctacgagaagaagaagcgcaagcgcgcgcagcaggccgccgagccgtcgtcgagctcgtccgccgccccggccggtgggagcgggagcatcagcagagctgctgcgacggccgccgctcatcaggctggagggagcagcgctgcaccgagcaacacctgagtacagtagatctgcagatcttgtttaattatcgtctccgcatcgcaagatttgagcttagctttctactgcttttgctatatatatgtgctttgcgttgcttcttttctctgcccatttcatccttttcttaccagggttttggatccccctttttttttttccggtttattaggtcaagtatatggctagatattggagtagtagtagctgaaaggggaagaagttggcgattaatcggtgcaagggcaactgtgtgttcatgatctgatacatatatattaatatatatatgttcttggt

SEQ ID NO: 241 - protein, 208 aa, Panicum virgatum
  misc_feature (16)..(148): Pfam Name: DUF640 Pfam Description: Protein of unknown function (DUF640)
  misc_feature: Ceres Clone ID no. 2004419
  misc_feature: Bit score of 380.3 for HMM based on sequences of Figure 10
  misc_feature: Functional Homolog Of SEQ ID NO. 209
MDPSGPGPSPVVGGGGGGDAPAVVPQQRPAQLSRYESQKRRDWNTFLQYLRNHRPPLTLARCSGAHVIEFLRYLDQFGKTKVHAAGCAYYGQPAPPGPCPCPLRQAWGSLDALIGRLRAAYEESGGTPESNPFAARAVRIYLREVRDSQAKARGIPYEKKKRKRAQQAAEPSSSSSAAPAGGSGSISRAAATAAAHQAGGSSAAPSNT

SEQ ID NO: 242 - protein, 212 aa, Oryza sativa subsp. indica
  misc_feature (13)..(145): Pfam Name: DUF640 Pfam Description: Protein of unknown function (DUF640)
  misc_feature: Public GI ID no. 125543059
  misc_feature: Bit score of 377.9 for HMM based on sequences of Figure 10
  misc_feature: Functional Homolog Of SEQ ID NO. 209
MDPSGPGPSSAAAGGAPAVAAAPQPPAQLSRYESQKRRDWNTFLQYLRNHRPPLTLARCSGAHVIEFLRYLDQFGKTKVHASGCAFYGQPSPPGPCPCPLRQAWGSLDALIGRLRAAYEESGGTPESNPFAARAVRIYLREVRDSQAKARGIPYEKKKRKRSQAAQPAGVEPSGSSSAAAAAAGGGDTGSGGGAAATTTAQPGGSGTAPSAS

SEQ ID NO: 243 - protein, 164 aa, Arabidopsis thaliana
  misc_feature (5)..(137): Pfam Name: DUF640 Pfam Description: Protein of unknown function (DUF640)
  misc_feature: Bit score of 285.6 for HMM based on sequences of Figure 10
  misc_feature: Locus ID NO. At1G16910
  misc_feature: Functional Homolog Of SEQ ID NO. 209
MTSTNTRNKGKCIVEGPPPTLSRYESQKSRDWNTFCQYLMTKMPPVHVWECESNHILDFLQSRDQFGKTKVHIQGCVFFGQKEPPGECNCPLKQAWGSLDALIGRLRAAYEENGGLTEKNPFARGGIRIFLREVRGSQAKARGVLYKKKKRLVVVGTGTSTTWT

SEQ ID NO: 244 - protein, 195 aa, Arabidopsis thaliana
  misc_feature (22)..(154): Pfam Name: DUF640 Pfam Description: Protein of unknown function (DUF640)
  misc_feature: Bit score of 323.0 for HMM based on sequences of Figure 10
  misc_feature: Locus ID NO. At1G78815
  misc_feature: Functional Homolog Of SEQ ID NO. 209
MASHSNKGKGIAEGSSQPQSQPQPQPHQPQSPPNPPALSRYESQKRRDWNTFCQYLRNQQPPVHISQCGSNHILDFLQYLDQFGKTKVHIHGCVFFGQVEPAGQCNCPLKQAWGSLDALIGRLRAAFEENGGLPERNPFAGGGIRVFLREVRDSQAKARGVPYKKRKKRKKRNPMKSHDGEDGTTGTSSSSNLAS

SEQ ID NO: 245 - protein, 219 aa, Arabidopsis thaliana
  misc_feature (36)..(168): Pfam Name: DUF640 Pfam Description: Protein of unknown function (DUF640)
  misc_feature: Bit score of 345.9 for HMM based on sequences of Figure 10
  misc_feature: Locus ID NO. At2G31160
  misc_feature: Functional Homolog Of SEQ ID NO. 209
MDMIPQLMEGSSAYGGVTNLNIISNNSSSVTGATGGEATQPLSSSSSPSANSSRYENQKRRDWNTFGQYLRNHRPPLSLSRCSGAHVLEFLRYLDQFGKTKVHTNICHFYGHPNPPAPCPCPLRQAWGSLDALIGRLRAAFEENGGKPETNPFGARAVRLYLREVRDMQSKARGVSYEKKKRKRPLPSSSTSSSSAVASHQQFQMLPGTSSTTQLKFEK

SEQ ID NO: 246 - protein, 177 aa, Arabidopsis thaliana
  misc_feature (7)..(139): Pfam Name: DUF640 Pfam Description: Protein of unknown function (DUF640)
  misc_feature: Bit score of 363.4 for HMM based on sequences of Figure 10
  misc_feature: Locus ID NO. At2G42610
  misc_feature: Functional Homolog Of SEQ ID NO. 209
MSSPRERGKSLMESSGSEPPVTPSRYESQKRRDWNTFGQYLKNQRPPVPMSHCSCNHVLDFLRYLDQFGKTKVHVPGCMFYGQPEPPAPCTCPLRQAWGSLDALIGRLRAAYEENGGPPETNPFASGAIRVYLREVRECQAKARGIPYKKKKKKKPTPEMGGGREDSSSSSSSFSFS

SEQ ID NO: 247 - protein, 201 aa, Arabidopsis thaliana
  misc_feature (15)..(147): Pfam Name: DUF640 Pfam Description: Protein of unknown function (DUF640)
  misc_feature: Bit score of 326.7 for HMM based on sequences of Figure 10
  misc_feature: Locus ID NO. At3G04510
  misc_feature: Functional Homolog Of SEQ ID NO. 209
MDLISQNHNNRNPNTSLSTQTPSSFSSPPSSSRYENQKRRDWNTFCQYLRNHHPPLSLASCSGAHVLDFLRYLDQFGKTKVHHQNCAFFGLPNPPAPCPCPLRQAWGSLDALIGRLRAAYEENGGAPETSPFGSRSVRIFLREVRDFQAKSRGVSYEKKRKRVNNKQITQSQPQSQPPLPQQPQQEQGQSMMANYHHGATQ

SEQ ID NO: 248 - protein, 195 aa, Arabidopsis thaliana
  misc_feature (30)..(162): Pfam Name: DUF640 Pfam Description: Protein of unknown function (DUF640)
  misc_feature: Bit score of 348.0 for HMM based on sequences of Figure 10
  misc_feature: Locus ID NO. At3G23290
  misc_feature: Functional Homolog Of SEQ ID NO. 209
MDHIIGFMGTTNMSHNTNLMIAAAATTTTTSSSSSSSSGGSGTNQLSRYENQKRRDWNTFGQYLRNHRPPLSLSRCSGAHVLEFLRYLDQFGKTKVHTHLCPFFGHPNPPAPCACPLRQAWGSLDALIGRLRAAFEENGGSPETNPFGARAVRLYLREVRDSQAKARGISYEKKKRKRPPPPLPPAQPAISSSPN

SEQ ID NO: 249 - protein, 190 aa, Arabidopsis thaliana
  misc_feature (7)..(139): Pfam Name: DUF640 Pfam Description: Protein of unknown function (DUF640)
  misc_feature: Bit score of 330.1 for HMM based on sequences of Figure 10
  misc_feature: Locus ID NO. At5G28490
  misc_feature: Functional Homolog Of SEQ ID NO. 209
MDLISHQPNKNPNSSTQLTPPSSSRYENQKRRDWNTFCQYLRNHRPPLSLPSCSGAHVLEFLRYLDQFGKTKVHHQNCAFFGLPNPPAPCPCPLRQAWGSLDALIGRLRAAYEENGGPPEANPFGSRAVRLFLREVRDFQAKARGVSYEKKRKRVNRQKPQTQPPLQLQQQQQQPQQGQSMMANYSGATV

SEQ ID NO: 250 - protein, 182 aa, Arabidopsis thaliana
  misc_feature (1)..(134): Pfam Name: DUF640 Pfam Description: Protein of unknown function (DUF640)
  misc_feature: Bit score of 338.4 for HMM based on sequences of Figure 10
  misc_feature: Locus ID NO. At5G58500
  misc_feature: Functional Homolog Of SEQ ID NO. 209
MEGETAAKAAASSSSSPSRYESQKRRDWNTFLQYLRNHKPPLNLSRCSGAHVLEFLKYLDQFGKTKVHATACPFFGQPNPPSQCTCPLKQAWGSLDALIGRLRAAFEEIGGGLPESNPFAAKAVRIYLKEVRQTQAKARGIPYDKKKRKRPHTDTATPIAGDGDDAEGSGGAALVVTAATTV

SEQ ID NO: 251 - protein, 196 aa, Arabidopsis thaliana
  misc_feature (13)..(145): Pfam Name: DUF640 Pfam Description: Protein of unknown function (DUF640)
  misc_feature: Bit score of 365.5 for HMM based on sequences of Figure 10
  misc_feature: Locus ID NO. At1G07090
  misc_feature: Functional Homolog Of SEQ ID NO. 209
MESADSGRSDPVKGDDPGPSFVSSPPATPSRYESQKRRDWNTFLQYLKNHKPPLALSRCSGAHVIEFLKYLDQFGKTKVHVAACPYFGHQQPPSPCSCPLKQAWGSLDALIGRLRAAYEENGGRPDSNPFAARAVRIYLREVRESQAKARGIPYEKKKRKRPPTVTTVRVDVASSRQSDGDPCNVGAPSVAEAVPP

SEQ ID NO: 252 - DNA, 449 bp, Arabidopsis thaliana
  misc_feature: Ceres Clone ID no. 1356785
  misc_feature: Encodes the peptide sequence at SEQ ID NO. 253
ggcatttttaagattcttttaattatatcagacagagagatatgacttttgtagttcgtcttcttgtgtgtctcttattgacgcttacaattacatcttctctagcccgcaaccctgtttccgtttcaggtgggtttgagaattctggattccaaaggagtttgttgatggtgaacgttgaggactacggtgacccatctgcaaatcctaagcacgaccccggcgttcctccgtcagcaaccggccaacgtgtcgtcggcagaggctgacgtaatgttttagttaacgcagaaggaaagaactcttcttgtttacattttcagtttgtctgagattaaatctcagttcatatagctttctctaatctgtctatatagatattttctcgtaatctccatacaacttcatttatttttttcttatggcaatgactttgtaccttattttcc

SEQ ID NO: 253 - protein, 75 aa, Arabidopsis thaliana [sequence omitted]

SEQ ID NO: 254 - DNA, 418 bp, Brassica napus
  misc_feature: Ceres Clone ID no. 951785
  misc_feature: Encodes the peptide sequence at SEQ ID NO. 255
ctgagtctctctgaccaaaggagagatgagttttgttgtacttcgtcttgctgtgtttcttctgttgacgcttacagttacatattcatcccctagttccgtttctgttccagttgttaagattggaatcgaaaggaggtcgttgatagtcaacgtcaaggattatgatggtccgtccgcaaacccaaaacacaatcccggcactcctccggttactaccagccaacgcagccccggcagagggtgacctacctctttaattaacccacaagggaagaagaaatgaatctctcagttttacatgttcagtttgtccgagatgaagtgaaatttctctgtttctacacctttctccaatatgtatattgatatcaatatgtgtcttagtcatttctcacacaatttcttataaataaag

SEQ ID NO: 255 - protein, 73 aa, Brassica napus
  misc_feature: Ceres Clone ID no. 951785
  misc_feature: Bit score of 188.0 for HMM based on sequences of Figure 6
  misc_feature: Functional Homolog Of SEQ ID NO. 253
MSFVVLRLAVFLLLTLTVTYSSPSSVSVPVVKIGIERRSLIVNVKDYDGPSANPKHNPGTPPVTTSQRSPGRG

SEQ ID NO: 256 - DNA, 228 bp, Populus balsamifera subsp. trichocarpa
  misc_feature: Ceres Annot ID no. 1440346
  misc_feature: Encodes the peptide sequence at SEQ ID NO. 257
atggcatttggagttcgcttgtgtttgtgtctcctgcttgtctttgctgtaacatcttcagctcgaaacaccatttcattctcagataacgaaatggccttggctataaaggggaggtccttgaagattacactgaacgattacggtgacccaatagcaaaccgtgggcacgatccttcacaaagaaacaagaattggggtggcagcggcggtggccgtaaaggctga

SEQ ID NO: 257 - protein, 75 aa, Populus balsamifera subsp. trichocarpa
  misc_feature: Ceres Annot ID no. 1440346
  misc_feature: Bit score of 203.3 for HMM based on sequences of Figure 6
  misc_feature: Functional Homolog Of SEQ ID NO. 253
MAFGVRLCLCLLLVFAVTSSARNTISFSDNEMALAIKGRSLKITLNDYGDPIANRGHDPSQRNKNWGGSGGGRKG

SEQ ID NO: 258 - DNA, 448 bp, Brassica napus
  misc_feature: Ceres Clone ID no. 1085177
  misc_feature: Encodes the peptide sequence at SEQ ID NO. 259
aaaccaaaatgagatgagttttggagttcgtcttcttttgtttctcatactaacccttccacttgttacatcctctggccgcaacactctttgtgtttcaggaattgggaagacaggggtagcaaaaagattattgatggtgagcatcgaggattatggtgatccatctgcaaacaccagacacgatcccagcgttccaaccaatgcaaaggctgacacaacaccttaaaagtcgttgattttacttgtgtactctatgtttttttttggggtaaaattgtgtactctatgttgaatatatatgtaataatatctgctttgagcgagttgtattacagtcatctgagtagaaaacacgcaaaatcttgtgaaaaccatgtaagatatgtatcaatccaacactttggggacaataaggcatggttttggtgtcaacataaaacatgac

SEQ ID NO: 259 - protein, 71 aa, Brassica napus
  misc_feature: Ceres Clone ID no. 1085177
  misc_feature: Bit score of 80.7 for HMM based on sequences of Figure 6
  misc_feature: Functional Homolog Of SEQ ID NO. 253
MSFGVRLLLFLILTLPLVTSSGRNTLCVSGIGKTGVAKRLLMVSIEDYGDPSANTRHDPSVPTNAKADTTP

SEQ ID NO: 260 - DNA, 400 bp, Arabidopsis thaliana
  misc_feature: Ceres Clone ID no. 157151
  misc_feature: Encodes the peptide sequence at SEQ ID NO. 261
aaactgcaattggataaccacaaccagaatcgattttgaatcatcatttctataaatatatacgactcatacatacatatacatacctcttaaacaaaactgagatgagttttggaactcgtcttcttttgtttctcatactaacacttccacttgtaacatcttcatccccaaacactcttcatgtttcaggaattgtgaagacagggactacaagtagattcttgatgatgaccatcgaggattatgacgatccatctgcaaacaccagacacgatcccagcgttccgaccaatgcaaaggctgacacaacaccttaaaactcttctgggtttacttgtttagtctatgttgaataaataaatatatatataataatctctctcttttgactgagctc

SEQ ID NO: 261 - protein, 71 aa, Arabidopsis thaliana
  misc_feature: Ceres Clone ID no. 157151
  misc_feature: Bit score of 67.1 for HMM based on sequences of Figure 6
  misc_feature: Functional Homolog Of SEQ ID NO. 253
MSFGTRLLLFLILTLPLVTSSSPNTLHVSGIVKTGTTSRFLMMTIEDYDDPSANTRHDPSVPTNAKADTTP

SEQ ID NO: 262 - DNA, 1191 bp, Arabidopsis thaliana
  misc_feature: Ceres Annot ID no. 544549
  misc_feature: Encodes the peptide sequence at SEQ ID NO. 263
atgtggctctctcatctcttcatgtccctctctaagctgacgtgtaatttctccattttctctgtctttatggcttgtggctctattggtatgtctcaagttagagatactccggttaaattgtttggctggacaattacaccggtttctcatgatccatactcttcttcgtcccatgttcttcctgattcttcctcgtcttcctcgtcttcttctctatcacttcgaccacacatgatgaataaccaatctgttactgacaatacaagtcttaagctgtcatctaatcttaacaacgagtcaaaagaaacatctgagaacagtgatgaccaacacagcgagatcacaacaattacatcggaagaagagaaaacaactgaactgaagaaaccagacaagattcttccatgtccgagatgcaacagcgcagacaccaaattctgttactacaacaactacaacgttaaccagccacgtcacttctgtagaaaatgccagaggtattggaccgctggtggatccatgaggatcgtcccggttggctcaggccgtcgcaagaacaagggatgggtttcttcagaccagtacctgcacatcacttccgaggatactgacaattacaatagctcctcaacaaagattctaagcttcgagtcttcggactctttggtaactgagaggcctaagcatcaatcaaacgaagtgaagataaacgctgaacctgtttcacaagaacccaacaacttccaagggttacttcctccccaagcatcccctgtttcgcctccttggccttaccaataccctccaaaccctagtttctaccacatgcccgtctactggggctgcgcgataccggtttggtctaccctcgacacttctacatgtcttgggaaaaggacaagagacgaaacttctcatgaaactgttaaagagagtaaaaatgcttttgagagaacaagcttgcttttggaatctcagagcatcaaaaatgaaacaagtatggctacaaataaccatgtgtggtatccagtaccgatgacccgcgagaagacacaagaattcagctttttcagtaatggagctgaaacaaagagcagcaacaacagattcgtccctgaaacgtatcttaacctgcaagcaaaccctgcagccatggcaagatctatgaacttcagagagagcatataa

SEQ ID NO: 263 - protein, 396 aa, Arabidopsis thaliana
  misc_feature (130)..(192): Pfam Name: zf-Dof Pfam Description: Dof domain, zinc finger
  misc_feature: Ceres Annot ID no. 544549
  misc_feature: Bit score of 808.2 for HMM based on sequences of Figure 2
MWLSHLFMSLSKLTCNFSIFSVFMACGSIGMSQVRDTPVKLFGWTITPVSHDPYSSSSHVLPDSSSSSSSSSLSLRPHMMNNQSVTDNTSLKLSSNLNNESKETSENSDDQHSEITTITSEEEKTTELKKPDKILPCPRCNSADTKFCYYNNYNVNQPRHFCRKCQRYWTAGGSMRIVPVGSGRRKNKGWVSSDQYLHITSEDTDNYNSSSTKILSFESSDSLVTERPKHQSNEVKINAEPVSQEPNNFQGLLPPQASPVSPPWPYQYPPNPSFYHMPVYWGCAIPVWSTLDTSTCLGKRTRDETSHETVKESKNAFERTSLLLESQSIKNETSMATNNHVWYPVPMTREKTQEFSFFSNGAETKSSNNRFVPETYLNLQANPAAMARSMNFRESI

SEQ ID NO: 264 - protein, 385 aa, Vitis vinifera
  misc_feature (114)..(176): Pfam Name: zf-Dof Pfam Description: Dof domain, zinc finger
  misc_feature: Public GI ID no. 157355009
  misc_feature: Bit score of 840.4 for HMM based on sequences of Figure 2
  misc_feature: Functional Homolog Of SEQ ID NO. 263
MLDFKDPAIKLFGKTISLPLNPHLSPTSPPPPPLSSTTSFPDDTSQGLQPPSQDQEFEGKEEDGTSRQTSEELKDPTASPGVSENPETPSADKETSKDGEQSEISGSQEKTLKKPDKILPCPRCNSMDTKFCYYNNYNVNQPRHFCKNCQRYWTAGGTMRNVPVGAGRRKNKNSSASQYPLQTARASAANGIHHPALGNNGTVLNFGSDAEKGNIAGLEPVVKNFQAFSPHVPCFPGASWSYPWNPAQWSSKIPPPAFCPPGFPISFYPAPAYWGCTVPGSWNIPCIPPTSSSPIHSALATNHNSPTLGKHARDGETLRIDDPNEAAKSSIWTTLGIKNDGSNGGSLLKAFQSKGDEKKRIAEMSPVLQANPAALSRSLNFHERA

SEQ ID NO: 265 - DNA, 1491 bp, Populus balsamifera subsp. trichocarpa
  misc_feature: Ceres Annot ID no. 1464457
  misc_feature: Encodes the peptide sequence at SEQ ID NO. 266
atgtcggatttggcgatcaagttgtttgggaagacgattccactgcaagtcaatcagctggagggggatgtgtcttgtgctattaacaagcacgagtcttcctcaggaacaccagttgccccacccgagcctgaggagtactgttacactgctactacttgcttgcacgaaaaagacaaggaagagcaagaaggcaaccacagggagtcttcaggagaggaaattgccaacgagaaacaagaagatgttacctcgtgtcagatcaccgaggattcaaaagatccaacatcatcaggaattagtgagaatccaaagactccctcagttgagagggaaacttcatcactgaaaagcagtaaggatgaagaacaaagggagacaagcatctcacaagaaaagactctgaagaagcctgataaaatacttccatgccctcgatgtaatagcatggatactaaattctgttattacaacaattacaacgtcaatcagcctcgtcatttctgtaaaaagtgtcagagatactggactgctggaggaaccatgaggaatgtgcctgtgggagcaggacggcgcaagaataagagctcttcagcttcacattatcgtcacttaatggtatcagaagctctccgaacagttcaagtccatgccatgaatggagttcataacccctctttcggaaacaacaccactgtccttgcatttggttccgattctcctctttgtgattctgttgcctctgtgttgaatctttcagagaaaacgcaaaatagtgttcgaaatgagtatcacaggcctgaacatagaatctttgttccttgtggaggggcgggaagtaatggggatgatcgctcaagtggatctcccgccacagcttcggattcatcagagaagggatgtaatggtaattcgagagaagcagttaataaggattatcaatcctttcctccccaggttccctgcttccccgggcctccttggccatatcaatggaactctgcgctgcctccacctacgttttaccccccaggctttccagtatcgttttaccctgcaccaacttactggggttgtactgtcccgagcccttggaatgtaccgccatgtgtatcccctccatcaacctctctaaagcactgtaccctagactccagtcctacttctacactgggtaaacattcaagggatggcagcatccttcatccagcctacttaaaagagccctcgagggagggcaccaaatcagtaaaaggtgttttggttccgaagacatcgaggattgatgatcctagtgaagctgcaaagagctctatatgggcgaccctcgggatcatgagtgaaaaatccaattctattaatggaggaggtctctttaagggctttcaatcaaaaaacgaagacaaaaatgacatggctgggagaacttcagtgttgcaagcgaaccctgctgcattgtcccggtctctcaatttccatgagaacaattga

SEQ ID NO: 266 - protein, 496 aa, Populus balsamifera subsp. trichocarpa
  misc_feature (137)..(199): Pfam Name: zf-Dof Pfam Description: Dof domain, zinc finger
  misc_feature: Ceres Annot ID no. 1464457
  misc_feature: Bit score of 1090.1 for HMM based on sequences of Figure 2
  misc_feature: Functional Homolog Of SEQ ID NO. 263
MSDLAIKLFGKTIPLQVNQLEGDVSCAINKHESSSGTPVAPPEPEEYCYTATTCLHEKDKEEQEGNHRESSGEEIANEKQEDVTSCQITEDSKDPTSSGISENPKTPSVERETSSLKSSKDEEQRETSISQEKTLKKPDKILPCPRCNSMDTKFCYYNNYNVNQPRHFCKKCQRYWTAGGTMRNVPVGAGRRKNKSSSASHYRHLMVSEALRTVQVHAMNGVHNPSFGNNTTVLAFGSDSPLCDSVASVLNLSEKTQNSVRNEYHRPEHRIFVPCGGAGSNGDDRSSGSPATASDSSEKGCNGNSREAVNKDYQSFPPQVPCFPGPPWPYQWNSALPPPTFYPPGFPVSFYPAPTYWGCTVPSPWNVPPCVSPPSTSLKHCTLDSSPTSTLGKHSRDGSILHPAYLKEPSREGTKSVKGVLVPKTSRIDDPSEAAKSSIWATLGIMSEKSNSINGGGLFKGFQSKNEDKNDMAGRTSVLQANPAALSRSLNFHENN

SEQ ID NO: 267 - DNA, 1904 bp, Zea mays
  misc_feature: Ceres Clone ID no. 1584660
  misc_feature: Encodes the peptide sequence at SEQ ID NO. 268
tcccgatcgatccatccatcgatcgcccacgcttccgtccatccagactccagagagataaaatctaattcctggacctggagtgcagaccgatcgccgccaccgccgccgcgttgtttcttgtctgcgcagctgtggtgatggtgcggtaaaagaaggctgctcgatcactccaacaaaaaaaaaaggtcgagatcgcacgcggcaggcgacaagcagtttccaaagagaagggaagcctagaggaagggagctagagatgggggagggcagagcaggagacggcctcatcaagctgttcgggaagaccatccccgtgccggagacggccgccgtcggcgaggctgccaaggacatgcaacaaagcggcggcagcggcagcggtacgactgatccgaaagggcaagagaacaacgttcaggactccacaggctcgcctccgcagcaggaggtcgcggacaccgaagactcgtcggcagacaaacagcagggcgaggcgggcaacccaaaggagaagctcaagaagcccgacaagatcctgccgtgcccgcggtgcaacagcatggacaccaagttctgctactacaacaactacaacatcaaccagccgcgccacttctgcaagaactgccagaggtactggactgccggcggtgccatgcgcaacgtgcccgtgggcgcaggccggcgcaagagcaagagcgcgtcggccacttcccacttcctccagagggtcagggccggtctgcccgtcgacccgctcgtctgcgcggcagccaagactaacggcacggtgctcagcttcggctctgccatgtccagcttagacctcacggagcagatgaaacagctcaaggaaaagctcgtcccgatagcgggggacgagcgctcagttgggtctcgcactcaaggaccttctgccaaggcagaagacccggaccggaaggagaatgttacagcagataaatccgcgagagttgttcagcatccatgcatgacgaacggggtggccatgtggccatttagctgtgcgccaccagtaccggcctctgcctgttacggcccaggcagcatcgcaatcccgttctacccggcagcagctgctgctgctgcctactggggttgcatggttccaggagcttggagtggcgcatggccgcctcactccggccagtccgagacgggctcgtccattacctccgcctctccagcagcatccaccaagtccaacatctgcttcacgccaggaaagcaccctagagaccgcgacgaggaaggaggcgccaaaggaaatggcaaggtgtgggtgcccaagatgatccggatcgacgacgtggacgaggtggccaggagctctatcctgtcgctaatcgggatcggcggcgacaaggcaggcaaagatggcggcagaggctgcaagctcgcaagggtttttgagcagaacgaagaggcggcaaggacggcaactcctcactcggcagccatcagcggcttgccgttcttgcaggggaacccagctgcgctctcgcggtcactgaccttccaggaggggtcttgagcctctcgctcgattcacagctgagaattttgtacattagagggttgtatgtaatctaatctaggtggggggtggggctcatagctgccagcggacattgaaactatacaatagatagatatttgtagatagccaatatatatgggtcgggggaggaaaaaaaggataatgagagcaagtccccttatttgtatatattataatggattggaatatttggttgccaagtggtcttccagcaatagcgccagatgttctgatccactggctgttggcccatcgatttcagtggacaaaagtggtccaccttattctgggaaatttcagcatatattcagtttgtttc

SEQ ID NO: 268 - protein, 432 aa, Zea mays
  misc_feature (89)..(151): Pfam Name: zf-Dof Pfam Description: Dof domain, zinc finger
  misc_feature: Ceres Clone ID no. 1584660
  misc_feature: Bit score of 940.2 for HMM based on sequences of Figure 2
  misc_feature: Functional Homolog Of SEQ ID NO. 263
MGEGRAGDGLIKLFGKTIPVPETAAVGEAAKDMQQSGGSGSGTTDPKGQENNVQDSTGSPPQQEVADTEDSSADKQQGEAGNPKEKLKKPDKILPCPRCNSMDTKFCYYNNYNINQPRHFCKNCQRYWTAGGAMRNVPVGAGRRKSKSASATSHFLQRVRAGLPVDPLVCAAAKTNGTVLSFGSAMSSLDLTEQMKQLKEKLVPIAGDERSVGSRTQGPSAKAEDPDRKENVTADKSARVVQHPCMTNGVAMWPFSCAPPVPASACYGPGSIAIPFYPAAAAAAAYWGCMVPGAWSGAWPPHSGQSETGSSITSASPAASTKSNICFTPGKHPRDRDEEGGAKGNGKVWVPKMIRIDDVDEVARSSILSLIGIGGDKAGKDGGRGCKLARVFEQNEEAARTATPHSAAISGLPFLQGNPAALSRSLTFQEGS

SEQ ID NO: 269 - protein, 476 aa, Oryza sativa subsp. japonica
  misc_feature (103)..(165): Pfam Name: zf-Dof Pfam Description: Dof domain, zinc finger
  misc_feature: Public GI ID no. 115474149
  misc_feature: Bit score of 1037.6 for HMM based on sequences of Figure 2
  misc_feature: Functional Homolog Of SEQ ID NO. 263
MDDLAAASPPHPPPPPPESHVPPPPQTPEKDSCEDTGDMRISEEKPCTDQELDADQMNSSSFNSSSECENQTPSNDEMTGSESKSEAAQTEGGGSSEEKVLKKPDKILPCPRCNSMDTKFCYYNNYNINQPRHFCKSCQRYWTAGGSMRNLPVGAGRRKSKSSTANYRSILITGSNLAAPAGDAPLYQLSIKGDQTATAVKFAPDSPLCNSMASVLKIGEQSKNAKPTSTAQPRNGETQTCPASGTTSDSPRNEPVNGAVSGHQNGIVGHSGVPPMHPIPCFPGPPFVYPWSPAWNGIPAMAPPVCTAPAEPANSSDNGSTASVQWSMPPVMPVPGYFPVIPSSVWPFISPWPNGAWSSPWIQPNCSVSASSPTSTSTCSDNGSPVLGKHSRDSKPQGDDKAEKNLWIPKTLRIDDPDEAAKSSIWTTLGIEPGDRSMFRSFQSKPESREQISGAARVLQANPAALSRSQSFQETT

SEQ ID NO: 270 - DNA, 1560 bp, Sorghum bicolor
  misc_feature: Ceres Annot ID no. 8636233
  misc_feature: Encodes the peptide sequence at SEQ ID NO. 271
atggatgcgggcaccgctcgacagttggagacgatcaaggtgatgagtgtcgtagcggtgtcgagtgtacccctgtgtttggagaagttgagtgcgtacctcgacgagaaacgtgttgcggttggcaagcttggtgtcgatggtcagcagcagcaagcaaagccgggagcttgtgtttgtttggatcggagtgagaagaagatgatggcggagtgccaaggaggaggaggaggggatttcctcatcaagctcttcgggaagaccatccccgtgccggagtccggcgacgccaaggagaacccgcacccggactcctccgacccgtccccgcagccggaggtcgtggacgcagaggaccccaagagctcaccggagacgacacaccagaagcccggccagggcaacggcagcggcgacgctgccagccagagggagaagctgaagaagcccgacaaggtgctgccatgcccgcgctgcaacagcatggacaccaagttctgctacttcaacaactacaacgtcaaccagccgcgccacttctgcaagaactgccagcgctactggaccgccggcggcgccatgcgcaacgttcccgtcggggccggtcgccgcaagaacaagaacgccgtcgccgcctcgcacttcctccacagggtcggggcggcctgcggcggcggcggcgacacgctcaagacgaccaacggcacggtgctcagcttcggcggccatggtggcggctgcgtgcctcctggtcctgcatgcttggacctcgtcgagcagctcagccaccacctggcggccccggtgatcaggaacgccggcaacaacccgggtccttgcagcgaaggatcgagcaactgcagggacgacaacaagaccatcaacgacaggtcttgtgtagacgaagccgcagcagcaaacggagacgacggatcagtgcagcacccagcaagcatgaacaacggcggcgcaaccgtgtggccgccgccgtacagctgcgcgccatctccggcggcgtatttctcctcgggcatcgcgatcccgatatacccagccgcaccaggttactggggctgcatggttcccggagcttggagcctgccatggccggtgcaacagcccccgtcgtcgcagtcgcaggggccggcggcgggcctctcgtcgtcgacgtcgcccaccaccaccagtgctccttcggtctcatcatccggggcagccgactcccacacgctggggctgggcaagcacccccgggaccgggaggagggtgacgacgggagaaacgccaaggtgtgggctcccaagaccatccggatagacgacgtggacgaggtggccaggagctccatctggtcgctcatcgggatcaaaggcgacaaggcgaagcagcaggacgacgatgctgctggtgggcacaagcagaagcagcttgttgggatggtgttcgagcccaagcgcgaggccaccaagaagccggcggccatgatgacaagctcgccgctcctgcacgccaaccccgtcgcgctcacgcgctccgtggccttccaggagggctcttga

SEQ ID NO: 271 - protein, 519 aa, Sorghum bicolor
  misc_feature (149)..(211): Pfam Name: zf-Dof Pfam Description: Dof domain, zinc finger
  misc_feature: Ceres Annot ID no. 8636233
  misc_feature: Bit score of 999.7 for HMM based on sequences of Figure 2
  misc_feature: Functional Homolog Of SEQ ID NO. 263
MDAGTARQLETIKVMSVVAVSSVPLCLEKLSAYLDEKRVAVGKLGVDGQQQQAKPGACVCLDRSEKKMMAECQGGGGGDFLIKLFGKTIPVPESGDAKENPHPDSSDPSPQPEVVDAEDPKSSPETTHQKPGQGNGSGDAASQREKLKKPDKVLPCPRCNSMDTKFCYFNNYNVNQPRHFCKNCQRYWTAGGAMRNVPVGAGRRKNKNAVAASHFLHRVGAACGGGGDTLKTTNGTVLSFGGHGGGCVPPGPACLDLVEQLSHHLAAPVIRNAGNNPGPCSEGSSNCRDDNKTINDRSCVDEAAAANGDDGSVQHPASMNNGGATVWPPPYSCAPSPAAYFSSGIAIPIYPAAPGYWGCMVPGAWSLPWPVQQPPSSQSQGPAAGLSSSTSPTTTSAPSVSSSGAADSHTLGLGKHPRDREEGDDGRNAKVWAPKTIRIDDVDEVARSSIWSLIGIKGDKAKQQDDDAAGGHKQKQLVGMVFEPKREATKKPAAMMTSSPLLHANPVALTRSVAFQEGS

SEQ ID NO: 272 - DNA, 1567 bp, Panicum virgatum
  misc_feature: Ceres Clone ID no. 1777035
  misc_feature: Encodes the peptide sequence at SEQ ID NO. 273
agccacagcacagcacggcacggccggtctctccttcttcttcttcttccccggcgccagcggacctgcgggacctcgtcgtcgtcggccgatccttcactggcagggcagcagcgagctgcaattaacggcggcggcggaggatcggggaggaggacgacgaagatggtggtggagtccgcggggggcggcggaggggactgcctcatcaagctgttcgggaagaccatccccgtgccggaggccgccgccgacaaggagagcggcagcagcatcagctcctgcaccgaatccgacaccccggagaacgcctcggagccgtccccgcagccggaggtcatggacgccgaggaccccaagagctcgccggagacgcagccgccgcccggcgccggcgacttggccgggcagagggagaagctcaagaggcccgacaaggtgctgccgtgcccgcgctgcaacagcatggacaccaagttctgctacttcaacaactacaacgtcaaccagccgcgccacttctgcaagaactgccagcgctactggaccgccggcggtgccatgcgcaacgtgcccgtcggcgccggccgccgcaagaacaagcacgccgtcgccgcctcccacttcctgcacagggtccgggccgcgctgcccgccgccgccggcgacccgctcagggccaacgccacggtgctcagcttcggcggccacggccacggcgcgcctcccgcggcgctgcaggacctcgccgagcaggtgacccacctgaaggagaagctgctcgtcccggcaaggaacgccggcgacccatcgccggtgggtccgtgcagcgaaggaccaagcagcacggacgacaaggcccatggcggcggcatcaaggagaagcccgccgtagacaggcctgcaaacggagcgccgcagcttccggcaagcatgaacggagcaaccgtgtggccgtacggcggctgcgcgccatctccggcggcgtatttctcgtcgggcatcgcgattccgatatacccggccgcaccgggttactggggctgcatggttcccgcccccggaccttggagcctgccatggtcggtgcagggcctctcgttgcccaccagtgctccttcactcccgtcatcggggcctgaccccgacctcacgctgggcaagcaccccagggagggggacgaggggagaagcgcccatggtggtggcaaggtgtgggcgcccaagacgatccggatcgacgacgccgacgaggtggccaggagctcgatctggtccctcatcgggatcaaaggcgacaggaagcaggacgccgcggatcatcacggcgctgccgggcacaagcacgggacggtgttcgagcagaagcgggaggccaagaagcaaccggcgatgatcgcaagctcgccgctcctgcacaccaaccccgtcgcgctgacacgctcggtgaccttccaggagggatcttgaagcccatcgatcggcactactgaaatttttgtaaatcagagagaggattgtaatataggtattggggggaagaaggaaacagagtgagtgtatgtgt

SEQ ID NO: 273 - protein, 434 aa, Panicum virgatum
  misc_feature (88)..(150): Pfam Name: zf-Dof Pfam Description: Dof domain, zinc finger
  misc_feature: Ceres Clone ID no. 1777035
  misc_feature: Bit score of 965.1 for HMM based on sequences of Figure 2
  misc_feature: Functional Homolog Of SEQ ID NO. 263
MVVESAGGGGGDCLIKLFGKTIPVPEAAADKESGSSISSCTESDTPENASEPSPQPEVMDAEDPKSSPETQPPPGAGDLAGQREKLKRPDKVLPCPRCNSMDTKFCYFNNYNVNQPRHFCKNCQRYWTAGGAMRNVPVGAGRRKNKHAVAASHFLHRVRAALPAAAGDPLRANATVLSFGGHGHGAPPAALQDLAEQVTHLKEKLLVPARNAGDPSPVGPCSEGPSSTDDKAHGGGIKEKPAVDRPANGAPQLPASMNGATVWPYGGCAPSPAAYFSSGIAIPIYPAAPGYWGCMVPAPGPWSLPWSVQGLSLPTSAPSLPSSGPDPDLTLGKHPREGDEGRSAHGGGKVWAPKTIRIDDADEVARSSIWSLIGIKGDRKQDAADHHGAAGHKHGTVFEQKREAKKQPAMIASSPLLHTNPVALTRSVTFQEGS

SEQ ID NO: 274 - DNA, 1719 bp, Panicum virgatum
  misc_feature: Ceres Clone ID no. 1990929
  misc_feature: Encodes the peptide sequence at SEQ ID NO. 275
agccacagcacagcacggcacggccggtctctccttcttcttcttcttcttcttctcccccggcgccagcggacctgcgggacctcgtcgtcgtcggccgatccttcactggcagggcagcagcgagctgcaattaacggcggcggcggaggatcggggaggaggacgacgaagatggtggtggagtccgcggggggcggcggaggggactgcctcatcaagctgttcgggaagaccatccccgtgccggaggccgccgccgacaaggagagcggcagcagcatcagctcctgcaccgaatccgacaccccggagaacgcctcggagccgtccccgcagccggaggtcgtggacgccgaggaccccaagagctcgccggagacgcagccgccgcccggcgccggcgacttggccgggcagagggagaagctcaagaggcccgacaaggtgctgccgtgcccgcgctgcaacagcatggacaccaagttctgctacttcaacaactacaacgtcaaccagccgcgccacttctgcaagaactgccagcgctactggaccgccggcggcgccatgcgcaacgtgcccgtcggcgccggccgccgcaagaacaagcacgccgtcgccgcctcccacttcctgcacagggtccgggccgcgctgcccgccgccgccggcgacccgctcagggccaacgccacggtgctcagcttcggcggccacggccacggcgcgcctcccgcggcgctgcaggacctcgccgagcaggtgacccacctgaaggagaagctgctcgtcccggcaaggaacgccggcgacccatcgccggtgggtccgtgcagcgaaggaccaagcagcacggacgacaaggcccatggcggcggcatcaaggagaagcccgccgtagacaggcctgcaaacggagcgccgcagcttccggcaagcatgaacggagcaaccgtgtggccgtacggcggctgcgcgccatctccggcggcgtatttctcgtcgggcatcgcgattccgatatacccggccgcaccgggttactggggctgcatggttcccgcccccggaccttggagcctgccatggtcggtgcagggcctctcgttgcccaccagtgctccttcactctcgtcatcggggcctgaccccgacctcacgctgggcaagcaccccagggagggggacgaggggagaagcgcccatggtggtggcaaggtgtgggcgcccaagacgatccggatcgacgacgccgacgaggtggccaggagctcgatctggtccctcatcgggatcaaaggcgacaggaagcaggacgccgcggatcatcacggcgctgccgggcacaagcacgggacggtgttcgagcagaagcgggaggccaagaagcaaccggcgatgatcgcaagctcgccgctcctgcacaccaaccccgtcgcgctgacacgctcggtgaccttccaggagggatcttgaagcccatcgatcggcactactgaaatttttgtaaatcagagagaggattgtaatataggtattggggggaagaaggaaacagagtgagtgtatgtgtaacatagctacttgtggacttgtaataggtatagccgcatgtacatagaattagctatttgggttggagaaagaccaggagatcaatatggcccctggttgtagataatatataatatgaaggaggaatatattgcttgaagt

SEQ ID NO: 275 - protein, 434 aa, Panicum virgatum
  misc_feature (88)..(150): Pfam Name: zf-Dof Pfam Description: Dof domain, zinc finger
  misc_feature: Ceres Clone ID no. 1990929
  misc_feature: Bit score of 965.0 for HMM based on sequences of Figure 2
  misc_feature: Functional Homolog Of SEQ ID NO. 263
MVVESAGGGGGDCLIKLFGKTIPVPEAAADKESGSSISSCTESDTPENASEPSPQPEVVDAEDPKSSPETQPPPGAGDLAGQREKLKRPDKVLPCPRCNSMDTKFCYFNNYNVNQPRHFCKNCQRYWTAGGAMRNVPVGAGRRKNKHAVAASHFLHRVRAALPAAAGDPLRANATVLSFGGHGHGAPPAALQDLAEQVTHLKEKLLVPARNAGDPSPVGPCSEGPSSTDDKAHGGGIKEKPAVDRPANGAPQLPASMNGATVWPYGGCAPSPAAYFSSGIAIPIYPAAPGYWGCMVPAPGPWSLPWSVQGLSLPTSAPSLSSSGPDPDLTLGKHPREGDEGRSAHGGGKVWAPKTIRIDDADEVARSSIWSLIGIKGDRKQDAADHHGAAGHKHGTVFEQKREAKKQPAMIASSPLLHTNPVALTRSVTFQEGS

SEQ ID NO: 276 - protein, 432 aa, Zea mays
  misc_feature (89)..(151): Pfam Name: zf-Dof Pfam Description: Dof domain, zinc finger
  misc_feature: Public GI ID no. 194692166
  misc_feature: Bit score of 940.9 for HMM based on sequences of Figure 2
  misc_feature: Functional Homolog Of SEQ ID NO. 263
MGEGRAGDGLIKLFGKTIPVPETAAVGEAAKDMQQSGGSGSGTTDPKGQENNVQDSTGSPPQQEVADTEDSSADKQQGEAGNPKEKLKKPDKILPCPRCNSMDTKFCYYNNYNINQPRHFCKNCQRYWTAGGAMRNVPVGAGRRKSKSASATSHFLQRVRAGLPVDPLVCAAAKTNGTVLSFGSAMSSLDLTEQMKQLKEKLVPIAGDERSVGSRTQGPSAKAEDPDRKENVTADKSARVVQHPCMTNGVAMWPFSCAPPVPASACYGPGSIAIPFYPAAAAAAAYWGCMVPGAWSGAWPPHSGQSETGSSITSASPAASTKSNICFTPGKHPRDRDEEGGAKGNGKVWVPKTIRIDDVDEVARSSILSLIGIGGDKAGKDGGRGCKLARVFEQNEEAARTATPHSAAISGLPFLQGNPAALSRSLTFQEGS

SEQ ID NO: 277 - DNA, 1554 bp, Populus balsamifera subsp. trichocarpa
  misc_feature: Ceres Annot ID no. 1458507
  misc_feature: Encodes the peptide sequence at SEQ ID NO. 278
atgtcagatttggcgataaagctgtttggcaagacgattccactgcaagtcaatcagcaggaggatgtttcttgtgctgctaacaagtacgagtcctcctcaggaacgcctcccgagtccgaggactgttatgataatactgctactgcaacttcctcacaggaaaaccacaactctcataaggaacgaggagagcaagaagggaacaacaacagggggccacaagctctgtatcagtatttcactgttactttgcattttgaaacggagacttcaggagaggaaattgccaatgataaacaagaagatgttacctcgaatcagatcaacaaggactcaaaaggtccaacatcatcaggcattagtgagaacccaaagactccctcagctgagagggaaacttcatcactgaaaagcagcaagaatgaagaacaaagtgagacaagcatctcgcaagagaagactttgaagaagcctgacaaaatacttccatgccctcgatgtaatagcatggacactaaattctgttattacaacaattacaatgtcaatcagcctcgtcatttctgtaaaaactgtcagagatactggactgctggaggaaccatgaggaatgtgcctgtgggagctggaaggcgcaagaataagagctcttctgcttcacactatcgtcacttaatggtatcagaagctctccgaacagctcaagtccatgccatgaatggatttcataacccctctctgggaaacaacggcactgtccttacctttggttccgattctcctctttgtgaatctgttgcctctgtgttgaacctttcagagaaaacacaaaatagtgttcgaaacgggtatcatagacctgaacatagaatccttgtgtcttgtggagggacaggaggtgacggggatgatcactcaagtgtatcttccgccacggcttcaaattcatcagagaagggatgcaatggtacttcgcgagaagcggttaacaaggattatcaatcatttcctccccaggcaccctgcttcccggggcctccttggccatatccatggaactctgcgattactccacctacgttttgcccttcaggctttccagtatcgtttttccctgcaccagcttactggggttgtactgttccaagcccttggaatgtaccgccatgtgcatcctctccatcagccactctaaaccacagtacccaaagctccagtcctacttttccactggggaaacattcaagggatggcaacatccttaatccaccctgcttagaagagccctccagggacggcaccaaatcagaaacgggtgttttggttccaaagaccttgaggattgatgatcctagtgaagctgcaaagagctctatatgggcgaccctcgggatcacgaatgagaaatccagttctattaatggaggaggtctcttcaagggctttcagtcaaaaagcgaagacagaaattacatggcaggaacaacttcagtgttgcaagcgaaccctgctgcgttttcccggtctctcaatttccatgagaacacttga

SEQ ID NO: 278 - protein, 517 aa, Populus balsamifera subsp. trichocarpa
  misc_feature (158)..(220): Pfam Name: zf-Dof Pfam Description: Dof domain, zinc finger
  misc_feature: Ceres Annot ID no. 1458507
  misc_feature: Bit score of 885.6 for HMM based on sequences of Figure 2
  misc_feature: Functional Homolog Of SEQ ID NO. 263
MSDLAIKLFGKTIPLQVNQQEDVSCAANKYESSSGTPPESEDCYDNTATATSSQENHNSHKERGEQEGNNNRGPQALYQYFTVTLHFETETSGEEIANDKQEDVTSNQINKDSKGPTSSGISENPKTPSAERETSSLKSSKNEEQSETSISQEKTLKKPDKILPCPRCNSMDTKFCYYNNYNVNQPRHFCKNCQRYWTAGGTMRNVPVGAGRRKNKSSSASHYRHLMVSEALRTAQVHAMNGFHNPSLGNNGTVLTFGSDSPLCESVASVLNLSEKTQNSVRNGYHRPEHRILVSCGGTGGDGDDHSSVSSATASNSSEKGCNGTSREAVNKDYQSFPPQAPCFPGPPWPYPWNSAITPPTFCPSGFPVSFFPAPAYWGCTVPSPWNVPPCASSPSATLNHSTQSSSPTFPLGKHSRDGNILNPPCLEEPSRDGTKSETGVLVPKTLRIDDPSEAAKSSIWATLGITNEKSSSINGGGLFKGFQSKSEDRNYMAGTTSVLQANPAAFSRSLNFHENT

SEQ ID NO: 279 - protein, 475 aa, Vitis vinifera
  misc_feature (118)..(180): Pfam Name: zf-Dof Pfam Description: Dof domain, zinc finger
  misc_feature: Public GI ID no. 147780712
  misc_feature: Bit score of 829.6 for HMM based on sequences of Figure 2
  misc_feature: Functional Homolog Of SEQ ID NO. 263
METMLPLLVFLLSFVPLLIAYEKSANKLAFVARFYLLLQHKMAVKKHSGFLKHKPLEGQEFEGKEEDGTSRQTSEELKDPTASPGVSENPETPSADKETSKDGEQSEISGSQEKTLKKPDKILPCPRCNSMDTKFCYYNNYNVNQPRHFCKNCQRYWTAGGTMRNVPVGAGRRKNKNSSASQYRHIMVSEALQTARASAANGIHHPALGNNGTVLNFGSDGPLCESVASVLNLADKTQNCMQNGFHKSEQRIPASCGGGENGDDHSSITLTNSAEKGNIAGLEPVVKNFQAFPPHVPCFPGASWSYPWNPAQWSSKIPPPAFCPPGFPISFYPAPAYWGCTVPGSWNIPCIPPTSSSPIHSALATNHNSPTLGKHARDGEVLNPANPGKEDHQKENNPERGVWIPKTLRIDDPNEAAKSSIWTTLGIKNDGSNGGSLLKAFQSKGDEKKRIAEMSPVLQANPAALSRSLNFHERA

SEQ ID NO: 280 - DNA, 1275 bp, Sorghum bicolor
  misc_feature: Ceres Annot ID no. 8642924
  misc_feature: Encodes the peptide sequence at SEQ ID NO. 281
atgggggagggcagagcaggagacggcctcatcaagctgttcggcaagaccatccccgtgccggagacgcccgccgcgggcgacgctgccaaggacatccaacaaagcggcagcagcggcacgactgatctgaaggggcaagagaacacccttcaggattccacaggctcgcctccgcagcaggaggttgcggacactgaagactcgtcggctgccaagaactcctcggcagacaaacagcagggcgaggcggccaaccagaaggagaagctcaagaagcctgacaagatcctgccttgcccccggtgcaacagcatggacaccaagttctgctactataacaactacaacatcaaccagccacgccacttctgcaagaactgccagaggtactggactgctggcggtgccatgcgcaacgtccctgtgggtgcaggccggcgcaagagcaagagcgcgtcagctgcttcccacttccttcagagggtcagggccgctttgcccatggatcccctctgcactgcagccaagacgaatggcacggtgctcagcttcggctcagacatgtccagcttagacctcacagagcagatgaagcacctgaaggagaagctcatcccaatagcggggatcaagaacggcgatgaacgttcagttggctcttgcactgaaggacctgcgaaggcagaagactcaaaccaaaaggagaatgttacagcagagaaatctgcaaaacttgttcagcatccatgcatgaacggggtggccatgtggccatttagctgtgcaccaccacctgcctgttacaccccaggcagcatagcaattccgttctacccagcacctgctgcctactggggctgcatggttccaggagcttggaatgccccatggccgcctcagtccccgtccgagacaggttcgacccttagcactgcttcaccagcatccacgaagtccaattgcttcacaccaggaaagcgccctagagactgcaacgaggaaggagataccaaaggaaatggcaaggtgtgggtgccaaagacgatccgaatcgatgacgtggatgaggtggctaggagttctatcttgtcgctaatcgggatcaatggcgacaaggcaggcaaagatggcaaagggtgcaagcttgcaagggtttttgagcagaaagaagaggcaaggacggcaactcactcagtcatcaatggcttgccattcttgcaggggaacccagctgcgctctcacggtcattgaccttccaggagggatcttga

SEQ ID NO: 281 - protein, 424 aa, Sorghum bicolor
  misc_feature (93)..(155): Pfam Name: zf-Dof Pfam Description: Dof domain, zinc finger
  misc_feature: Ceres Annot ID no. 8642924
  misc_feature: Bit score of 807.1 for HMM based on sequences of Figure 2
  misc_feature: Functional Homolog Of SEQ ID NO. 263
MGEGRAGDGLIKLFGKTIPVPETPAAGDAAKDIQQSGSSGTTDLKGQENTLQDSTGSPPQQEVADTEDSSAAKNSSADKQQGEAANQKEKLKKPDKILPCPRCNSMDTKFCYYNNYNINQPRHFCKNCQRYWTAGGAMRNVPVGAGRRKSKSASAASHFLQRVRAALPMDPLCTAAKTNGTVLSFGSDMSSLDLTEQMKHLKEKLIPIAGIKNGDERSVGSCTEGPAKAEDSNQKENVTAEKSAKLVQHPCMNGVAMWPFSCAPPPACYTPGSIAIPFYPAPAAYWGCMVPGAWNAPWPPQSPSETGSTLSTASPASTKSNCFTPGKRPRDCNEEGDTKGNGKVWVPKTIRIDDVDEVARSSILSLIGINGDKAGKDGKGCKLARVFEQKEEARTATHSVINGLPFLQGNPAALSRSLTFQEGS

SEQ ID NO: 282 - protein, 440 aa, Oryza sativa subsp. japonica
  misc_feature (101)..(163): Pfam Name: zf-Dof Pfam Description: Dof domain, zinc finger
  misc_feature: Public GI ID no. 115451001
  misc_feature: Bit score of 740.4 for HMM based on sequences of Figure 2
  misc_feature: Functional Homolog Of SEQ ID NO. 263
MGECKVGGGGGGGDCLIKLFGKTIPVPEPGACAAGDVDKDLQHSGSSTTEPKTQENTVQDSTSPPPQPEVVDTEDSSADKNSSENQQQQGDTANQKEKLKKPDKILPCPRCSSMDTKFCYYNNYNINQPRHFCKNCQRYWTAGGAMRNVPVGAGRRKSKSVSAASHFLQRVRAALPGDPPLYAPVKTNGTVLSFGSDLSTLDLTEQMKHLKDKFIPTTGIKNTDEMPVGLCAEGLSKTEESNQTNLKEKVSADRSPNVAQHPCMNGGAMWPFGVAPPPAYYTSSIAIPFYPAAAAAVAAYWGCMVPGAWNAPWPPQSQSQSVSSSSAASPVSTMTNCFRLGKHPRDGDEELDSKGNGKVWVPKTVRIDDVDEVARSSIWSLIGIKGDKVGADHGRGCKLAKVFESKDEAKASTHTAISSLPFMQGNPAALTRSVTFQEGS

SEQ ID NO: 283 - protein, 366 aa, Arabidopsis thaliana
  misc_feature (100)..(162): Pfam Name: zf-Dof Pfam Description: Dof domain, zinc finger
  misc_feature: Bit score of 712.8 for HMM based on sequences of Figure 2
  misc_feature: Functional Homolog Of SEQ ID NO. 263
MSQVRDTPVKLFGWTITPVSHDPYSSSSHVLPDSSSSSSSSSLSLRPHMMNNQSVTDNTSLKLSSNLNNESKETSENSDDQHSEITTITSEEEKTTELKKPDKILPCPRCNSADTKFCYYNNYNVNQPRHFCRKCQRYWTAGGSMRIVPVGSGRRKNKGWVSSDQYLHITSEDTDNYNSSSTKILSFESSDSLVTERPKHQSNEVKINAEPVSQEPNNFQGLLPPQASPVSPPWPYQYPPNPSFYHMPVYWGCAIPVWSTLDTSTCLGKRTRDETSHETVKESKNAFERTSLLLESQSIKNETSMATNNHVWYPVPMTREKTQEFSFFSNGAETKSSNNRFVPETYLNLQANPAAMARSMNFRESI

SEQ ID NO: 284 - DNA, 1965 bp, Zea mays
  misc_feature: Ceres Clone ID no. 1573856
  misc_feature: Encodes the peptide sequence at SEQ ID NO. 285
gagcagatatcatccgttcgtttgtttgcccttttttgccggcctcctcgtctcttccggttccggctacaagtgaagtgagctcggccgtctgttgcctagcgtgctgcttcgttcgtcgttggcttgcagcagcttgccgaagagaagaaagcagcaggccgggagctttctgtttgtttggatccgagtgagaagaagatggtggccgagtgccacggaggaggagcagcagcagcaggaggggacttcctcatcaagctcttcgggatgaccatccccgtgccggagtgcggcgacgccaaggatattcagcagagcaagagcaacaggtggaccgagcaggatcaggattcccatggcctggagaccgcgcccgcgcccgcgcacacggacacggacacggacacctccgacccgtccccgcagccggaggtcgtggacgccgaggaccccacggagacgcaacagaggcccggcaacggcgacggcgagggcgatgctgccggccagagggagaagctgaagaagcccgacaaggtgctgccgtgcccgcgctgcaacagcatggacaccaagttctgctacttcaacaactacaacgtcaaccagccgcgccacttctgcaagaactgccagcggtactggacggccggcggcgccatgcgcaacgtgcccgtgggggccggccgccgcaagaacaagaacgccgccgcctcgcacttcttccagagggtccgggcgaccaacgccacggtgctcagcttcgggggccatggtggcgcgcctcctgctgcccgcttggacctggacctcgccgagcagctgagccaccagctggccccggtcaggagcgccggcgacgcgggccgcccttgcagcgaaggatcgagcagcagggacggcaacggcagcaggtcttctgtagacgaagctgcagcaaacgcagacgacgggtcagtgcagcagcacccaggcccagcaagcatgaacagcagcggggcaaccgtgtggccgccgtacagctgcgccccagctccggcggcgtacttcccccagggcatcgcgattccgatctacccggccgcaccggcctactggggctgcatggttcccggagcttggagcctgccatggccggtgcagcacccgtcgtcgtcgtcgtcgccgtcgcccaccaccaccagtgctccttcagtcgtctcgtcatccggggcagctgacgactcatcatcccacgcgctgggcaagcgcccccgggaccgggagggtgacgacgggagaaacggcggcaacgccaaggtgtgggcgcccaagagcatccggatagacgacgtggacgaggtggccaggagctcaatctggtccctcgtcgggatcaaaggcgaccagacgaagcagcaggacgcagcagacgaccacgccggtgggcacagcaagcagctcgggacggtgttcgagcccaagcgcggcgaggccaccaagaaggctatgatgacaagctcgccgctccttcacgcgaaccccgttgcgctcacgcgctccgtggccttccaggaggggtcttgattcttcttcaaggacatccatcagcagcagcaggaatttcctcatgcaacgttccttctcatctgaacttctgaactgaacatgagctgatcagcctgacagtacgtactgaattttgtttttgtataaatcatcataggattgtaatatctatctatatgcttagtgggaaacttagctagcgtatgtgtaagtggacttgtaatataggcggcacgcaggatgtacatagaattaattagctatatgggtttgagaaagaccaggagatcaataagaggtccctgggtgtagataaataacattaggggaaggaatgtattgcttcaggtatttcactcttcagcaacttgttgtcaaagtccattctataacaaagtattctattttttgttc

SEQ ID NO: 285 - protein, 455 aa, Zea mays
  misc_feature (110)..(172): Pfam Name: zf-Dof Pfam Description: Dof domain, zinc finger
  misc_feature: Ceres Clone ID no. 1573856
  misc_feature: Bit score of 673.2 for HMM based on sequences of Figure 2
  misc_feature: Functional Homolog Of SEQ ID NO. 263
MVAECHGGGAAAAGGDFLIKLFGMTIPVPECGDAKDIQQSKSNRWTEQDQDSHGLETAPAPAHTDTDTDTSDPSPQPEVVDAEDPTETQQRPGNGDGEGDAAGQREKLKKPDKVLPCPRCNSMDTKFCYFNNYNVNQPRHFCKNCQRYWTAGGAMRNVPVGAGRRKNKNAAASHFFQRVRATNATVLSFGGHGGAPPAARLDLDLAEQLSHQLAPVRSAGDAGRPCSEGSSSRDGNGSRSSVDEAAANADDGSVQQHPGPASMNSSGATVWPPYSCAPAPAAYFPQGIAIPIYPAAPAYWGCMVPGAWSLPWPVQHPSSSSSPSPTTTSAPSVVSSSGAADDSSSHALGKRPRDREGDDGRNGGNAKVWAPKSIRIDDVDEVARSSIWSLVGIKGDQTKQQDAADDHAGGHSKQLGTVFEPKRGEATKKAMMTSSPLLHANPVALTRSVAFQEGS

SEQ ID NO: 286 - DNA, 1521 bp, Populus balsamifera subsp. trichocarpa
  misc_feature: Ceres Annot ID no. 1476818
  misc_feature: Encodes the peptide sequence at SEQ ID NO. 287
atgtcggagccaaaagaccaggcatttaagctgttcgggaagactattcaagtgccagagatctctgttactactgctaccaccacagatgatgatgatgacgacgatagtcaagatcaagaccgtccttcttgtgcaaactcttctcttgatgagaccaatattactgacgattataataacaatgataaaagagatcatggagaagaagatacagaaactgatgataaggattcggtgggtaaaacaacaattgagaaccaggaagatggagcttcacctgtagctgccaaagagtcttcaaatctagatgcaacttcagggacaagtgaaaaccctaaaacaccttccgttgagaaagagagcacggcgttgaaaacttcaaacactgaagaagaacagagtgatacaagtaattcacaagagaaaaccctgaagaaaccagacaagatcattccatgcccccgctgtaatagcatggacacaaagttttgttactacaacaattacaacgtgaaccaaccccgacacttctgcaagaattgtcagagatattggacagctggcggtaccatgaggaatgtgcctgtgggtgctggtcgtcgcaaaaacaagaactcagcttctcattaccgtcacataaccattcctgaagctcttcagaatggtcgagctgatgttccaaatggagtccaccatccttcactgaaaactaatggaacagtgctaacctttggttctgatgcacctcttcatgaatcaatggcttcggtattgaatcttgctgataaaacaatgcggaactgcacaatgaatgggtttcataaacctgaagcattaagggtcccagtttcttatggaggtggtgaaaacggtgatgaccattctaatggatcttctgtcactgtgtcaaattcaagcgatgaagctggcaaaagtgtgtcaaaagaatcagctatgcagaattatcagggctacccccctcagataccatgttttcctggagttccctggccttacccttggaattcagctcaatggagctccccagtacccccacctgccttttgcccttccagttttcctatgccattctatcctgcagcagcttattggggttgtactgtaccaggtgcttggaatgtcccttggcttcctcaaccatcttctccaaaacaaacctcctcgagctctgaccctaactctccaaccctagggaaacattcaagagatgaaaacttgctcaaacctagcaactccaaagaagagctggtgaacactgaaagatgcctttggattccgaaaacgctgaggattgatgacccaggagaagccgcaaaaagctctatatggacaacacttgggattaagaatgataagcctggctcatttggtggccgaggactctttaaggcctttgattcaaaggttgagaagaatcgcgcagccgaaacctctccagtcttgcacgctaatcctgcagcattgtctagatctctcaaatttcaggagagctcataa

SEQ ID NO: 287 - protein, 506 aa, Populus balsamifera subsp. trichocarpa
  misc_feature (147)..(209): Pfam Name: zf-Dof Pfam Description: Dof domain, zinc finger
  misc_feature: Ceres Annot ID no. 1476818
  misc_feature: Bit score of 666.9 for HMM based on sequences of Figure 2
  misc_feature: Functional Homolog Of SEQ ID NO. 263
MSEPKDQAFKLFGKTIQVPEISVTTATTTDDDDDDDSQDQDRPSCANSSLDETNITDDYNNNDKRDHGEEDTETDDKDSVGKTTIENQEDGASPVAAKESSNLDATSGTSENPKTPSVEKESTALKTSNTEEEQSDTSNSQEKTLKKPDKIIPCPRCNSMDTKFCYYNNYNVNQPRHFCKNCQRYWTAGGTMRNVPVGAGRRKNKNSASHYRHITIPEALQNGRADVPNGVHHPSLKTNGTVLTFGSDAPLHESMASVLNLADKTMRNCTMNGFHKPEALRVPVSYGGGENGDDHSNGSSVTVSNSSDEAGKSVSKESAMQNYQGYPPQIPCFPGVPWPYPWNSAQWSSPVPPPAFCPSSFPMPFYPAAAYWGCTVPGAWNVPWLPQPSSPKQTSSSSDPNSPTLGKHSRDENLLKPSNSKEELVNTERCLWIPKTLRIDDPGEAAKSSIWTTLGIKNDKPGSFGGRGLFKAFDSKVEKNRAAETSPVLHANPAALSRSLKFQESS

SEQ ID NO: 288 - DNA, 1512 bp, Populus balsamifera subsp. trichocarpa
  misc_feature: Ceres Annot ID no. 1450024
  misc_feature: Encodes the peptide sequence at SEQ ID NO. 289
atgttggagccaaaagacccggctattaagctgtttgggaagactattcaagtgacagagatctcttctactaccactacagataatgatgatagtcaagatcaagaccgtccatcttgtgcaagctcttctctttatgacgccgattctgataataataagagatatcatggagaagaagatatagaagctgatgataaggactcggtggaaaaaagcctgactgagaaacaggaagatggagtttcacccgtggctactgaagagccttcaaatccagatgcaacctcagggacaagtgaaaaccctaaaacaccttccattgagaaggagagtgaaggattgcaaacttcaaggacagaagaagaagatagtgatacaagtaattcgccagaaaagaccctgaaaaaacctgataagatccttccatgcccccgctgtaatagcatggacaccaagttctgttactacaacaattacaacgtgaaccaaccccgacacttctgcaagaattgtcagagatattggacagctgggggaaccatgaggaatgtgcctgtgggtgctggtcgtcgcaaaaacaagaactcagcttctcattatcgtcacataaccattcctgaagctcttcagaatgttcgagctgatgttccaaatggagtctaccatccttcaatgaaaactaatggaacagtgctaacctttggctctgacacacctcttcatgaatcaatggcttctgtattgaaccttgcagataaaacaacgcggaattgcacaagaaacgggtctcataaacctgatgcagtgaggattccagtttcttatggaagtggagaaaacggtgatgaccattctaatggatcttcagtcacagtgtcaaattcaattgatgaggcaggcaaaagcatgtcgaaagaatcagctatgcagaattgtcagggctttccccctgagataccatgttttcctggagttccctggccttacccttggaattcagctcaatggagctccccattacccccacctgccttttgccctcccggttttcctatgccattctatcctgcagcagcatactggggttgcaccgtaccaggtgcttggaatatcccttggcttcctcagccatcttctcccaagcaaacctcctcgagctctggcccaaactctccaaccctagggaaacattcaagggatgaaaacatgctcaaatctagcaactctgaagaaggggagtcggcaaaagaaaataacactgaaagatgcctttggatcccaaaaacgctcaggattgttgacccaggtgaagctgcaaaaagctctatatggacgactctggggattaagaatgataagcctgacttgattggtgggcgaggactgtttaaggcgtttgattcaaaggtcgaaaagaatcatgaagccgaaacctctccagtcttacaagctaatcctgcagcattgtctagatcactcaaatttcaggagagctcgtattttgggtag

SEQ ID NO: 289 - protein, 503 aa, Populus balsamifera subsp. trichocarpa
  misc_feature (137)..(199): Pfam Name: zf-Dof Pfam Description: Dof domain, zinc finger
  misc_feature: Ceres Annot ID no. 1450024
  misc_feature: Bit score of 646.8 for HMM based on sequences of Figure 2
  misc_feature: Functional Homolog Of SEQ ID NO. 263
MLEPKDPAIKLFGKTIQVTEISSTTTTDNDDSQDQDRPSCASSSLYDADSDNNKRYHGEEDIEADDKDSVEKSLTEKQEDGVSPVATEEPSNPDATSGTSENPKTPSIEKESEGLQTSRTEEEDSDTSNSPEKTLKKPDKILPCPRCNSMDTKFCYYNNYNVNQPRHFCKNCQRYWTAGGTMRNVPVGAGRRKNKNSASHYRHITIPEALQNVRADVPNGVYHPSMKTNGTVLTFGSDTPLHESMASVLNLADKTTRNCTRNGSHKPDAVRIPVSYGSGENGDDHSNGSSVTVSNSIDEAGKSMSKESAMQNCQGFPPEIPCFPGVPWPYPWNSAQWSSPLPPPAFCPPGFPMPFYPAAAYWGCTVPGAWNIPWLPQPSSPKQTSSSSGPNSPTLGKHSRDENMLKSSNSEEGESAKENNTERCLWIPKTLRIVDPGEAAKSSIWTTLGIKNDKPDLIGGRGLFKAFDSKVEKNHEAETSPVLQANPAALSRSLKFQESSYFG

SEQ ID NO: 290 - DNA, 1362 bp, Populus balsamifera subsp. trichocarpa
  misc_feature: Ceres Annot ID no. 1503065
  misc_feature: Encodes the peptide sequence at SEQ ID NO. 291
atgttggagccaaaagacccggctattaagctgtttgggaagactattcaagactcggtggaaaaaagcctgactgagaaacaggaagatggagtttcacccgtggctactgaagagccttcaaatccagatgcaacctcagggacaagtgaaaaccctaaaacaccttccattgagaaggagagtgaaggattgcaaacttcaaggacagaagaagaagatagtgatacaagtaattcgccagaaaagaccctgaaaaaacctgataagatccttccatgcccccgctgtaatagcatggacaccaagttctgttactacaacaattacaacgtgaaccaaccccgacacttctgcaagaattgtcagagatattggacagctgggggaaccatgaggaatgtgcctgtgggtgctggtcgtcgcaaaaacaagaactcagcttctcattatcgtcacataaccattcctgaagctcttcagaatgttcgagctgatgttccaaatggagtctaccatccttcaatgaaaactaatggaacagtgctaacctttggctctgacacacctcttcatgaatcaatggcttctgtattgaaccttgcagataaaacaacgcggaattgcacaagaaacgggtctcataaacctgatgcagtgaggattccagtttcttatggaagtggagaaaacggtgatgaccattctaatggatcttcagtcacagtgtcaaattcaattgatgaggcaggcaaaagcatgtcgaaagaatcagctatgcagaattgtcagggctttccccctgagataccatgttttcctggagttccctggccttacccttggaattcagctcaatggagctccccattacccccacctgccttttgccctcccggttttcctatgccattctatcctgcagcagcatactggggttgcaccgtaccaggtgcttggaatatcccttggcttcctcagccatcttctcccaagcaaacctcctcgagctctggcccaaactctccaaccctagggaaacattcaagggatgaaaacatgctcaaatctagcaactctgaagaaggggagtcggcaaaagaaaataacactgaaagatgcctttggatcccaaaaacgctcaggattgttgacccaggtgaagctgcaaaaagctctatatggacgactctggggattaagaatgataagcctgacttgattggtgggcgaggactgtttaaggcgtttgattcaaaggtcgaaaagaatcatgaagccgaaacctctccagtcttacaagctaatcctgcagcattgtctagatcactcaaatttcaggagagctcgtattttgggtag

SEQ ID NO: 291 - protein, 453 aa, Populus balsamifera subsp. trichocarpa
  misc_feature (87)..(149): Pfam Name: zf-Dof Pfam Description: Dof domain, zinc finger
  misc_feature: Ceres Annot ID no. 1503065
  misc_feature: Bit score of 644.5 for HMM based on sequences of Figure 2
  misc_feature: Functional Homolog Of SEQ ID NO. 263
MLEPKDPAIKLFGKTIQDSVEKSLTEKQEDGVSPVATEEPSNPDATSGTSENPKTPSIEKESEGLQTSRTEEEDSDTSNSPEKTLKKPDKILPCPRCNSMDTKFCYYNNYNVNQPRHFCKNCQRYWTAGGTMRNVPVGAGRRKNKNSASHYRHITIPEALQNVRADVPNGVYHPSMKTNGTVLTFGSDTPLHESMASVLNLADKTTRNCTRNGSHKPDAVRIPVSYGSGENGDDHSNGSSVTVSNSIDEAGKSMSKESAMQNCQGFPPEIPCFPGVPWPYPWNSAQWSSPLPPPAFCPPGFPMPFYPAAAYWGCTVPGAWNIPWLPQPSSPKQTSSSSGPNSPTLGKHSRDENMLKSSNSEEGESAKENNTERCLWIPKTLRIVDPGEAAKSSIWTTLGIKNDKPDLIGGRGLFKAFDSKVEKNHEAETSPVLQANPAALSRSLKFQESSYFG

SEQ ID NO: 292 - protein, 473 aa, Vitis vinifera
  misc_feature (116)..(178): Pfam Name: zf-Dof Pfam Description: Dof domain, zinc finger
  misc_feature: Public GI ID no. 147866358
  misc_feature: Bit score of 590.0 for HMM based on sequences of Figure 2
  misc_feature: Functional Homolog Of SEQ ID NO. 263
  misc_feature (423)..(423): Xaa is any aa, unknown, or other
MQEPKDPAFKLFGKTIPMLADGDAPVSSGDVGDSGAAVAREDGLEEETEKDALGGKPAETKGEDGSEESRNSETVAESNENPKTPSIAEENVTLKTSKAEKGQSDSPDSQEKTLKKPDKILPCPRCNSMDTKFCYYNNYNINQPRHFCKSCQRYWTAGGTMRNVPVGAGRRKNKNSASHYRHITISEALQTVQIEATNGVHQPTLKSNGTVLTFGSDAPFCDSMTSVLNLEEKKMPNGARNGFHTHKEQGIPVSFRVQENGDDHSSASSITVSNSSEEGSKYGLHEAKRNSHGVPSRIPCIPGIPWPYPWNSAVPPPFCPPGFPMPFYPAAYWNCHVTAPWNIPWLSPPSSSANQKTPNSRQNSPTLGKHSREGDILKPSIVEDEETPKQRSSERCLWVPKTLRIDDPAEAAKSSIWTTLGIXNDKVDSVSGGGLFNAFHLKGDDKNHAMDTSAVLRANPAALSRSLNFQESS

SEQ ID NO: 293 - DNA, 2046 bp, Zea mays
  misc_feature: Ceres Clone ID no. 230073
  misc_feature: Encodes the peptide sequence at SEQ ID NO. 294
gcgtcgccaactccacttgtcagatcttgcccgtatggtatggagctcgccggagcagcctcccctcacccgccgccggaatcccacgtggcgccgccccgcccacctccgcagccgccggaagaggatttatgtgaagatagaggggacatgagagtcaccggcgaaaagccatgcacacatcgggaatcagatgttggtcagacaaatagttgtagccttaacaattccagtgagtgtgagaatcatacacccagcaacgacgaaatatcggaaccagagtccaatttggagatggccaagactgatcagggcggcgatgtgccgagcggagagaaggtcctgaagaagccagacaagatcctgccgtgccctcgctgcaacagcatggacacgaagttctgctactacaacaactacaacatcaagcagccaaggcatttctgcaagagctgtcagaggtactggaccgcaggcggaagcatgagaaacatccccgttggtgctgggaggcgcaagagcaagagctccagcgcgagttgccgcagcgtgttgattcccgttccaggcagcagtagtgtagctaatcctggcggagaggcttccctgtttccgttgtccgtaaaagcaaaccaagcagcagttagcttcgggcctgattcccccctctgcacctccatggcctccgtgctgaagatcggaggaggaggagagcaggttaagagctgcagccctgcctcagcagcagcacagcccaggaacggagaaacccagacccagacgtgcgcaccttcttctgctgctacaacaccatcagatggtccagggaatggattgcagaaaggagcagagagcgcacaccaaaaccaaaaccaaaaccaaaacggaatcattgggcacagcaacggagtcactccagtgcatcctataccgttcttccccggaccgcctttcgtgtacccctggagtccagcatggaacggcattcccgccatggcagcggcggtgtgcgcagccccagcgacagccgaagcagcgatttcatcagaacacggcaccgcgagcagcaccgtccagtggaacgtgccaccagcgatcgtgcccgtgctgccaccgggattctgcggcccgatcccagtcccggtaatcccgccgccttccgtctggccactgatcactccctggcccaacgcagcatggagcgcgccgtggctcgggcctagcgctagcgtgccgccggggtcatctcggagcagcggcagcagcacgtgctccgacagcggctgcggctccggctcccccgtcctgggaaagcactcgagggagtcgaggccgcagggcgacgagaaggcggaacgacggtgcctgtggatccccaagacgctccggatcgacgaccctgtcgaggccgccaagagctcgatctggacgacgctcgggatcgagcctggcgaccggggcatgttcaggccgttccagtcgaagcatggacggcagcaggagctgcaagcgtccggcgccgctcgcgccctgcaggccaacccggcggctctgtcgcgctcgcagtcttttcaggagacgacgtgattactacactacagaccagagcgttgctgaaacctgtgtggcattactattcagagacgattgtatttcaacttcaaggggggaaatgagagagagagcgcgagagagagattggcctgtttggttcactacctcagttgccacactttgcctaacttttctgactaaggttagttattcaattcgaacgactaacattaggcaaagtgtggcatatttagtcataaaccaaacatgccatatatgttctgtacaatatgattggcaacataggtgctgctgctgtacaaggcagcggacaccgttactgtaactgtaaccattggaagagtgcatcctcaaacagtgtgttgtttccatgtagagcgtgcccccaacatgttgggttggaggtgatcaggtttccagcgcgtgcgtgcttggttgtacaagaataactgtcaatagcttcccttcgcc

SEQ ID NO: 294 - protein, 515 aa, Zea mays
  misc_feature (104)..(166): Pfam Name: zf-Dof Pfam Description: Dof domain, zinc finger
  misc_feature: Ceres Clone ID no. 230073
  misc_feature: Bit score of 577.1 for HMM based on sequences of Figure 2
  misc_feature: Functional Homolog Of SEQ ID NO. 263
MELAGAASPHPPPESHVAPPRPPPQPPEEDLCEDRGDMRVTGEKPCTHRESDVGQTNSCSLNNSSECENHTPSNDEISEPESNLEMAKTDQGGDVPSGEKVLKKPDKILPCPRCNSMDTKFCYYNNYNIKQPRHFCKSCQRYWTAGGSMRNIPVGAGRRKSKSSSASCRSVLIPVPGSSSVANPGGEASLFPLSVKANQAAVSFGPDSPLCTSMASVLKIGGGGEQVKSCSPASAAAQPRNGETQTQTCAPSSAATTPSDGPGNGLQKGAESAHQNQNQNQNGIIGHSNGVTPVHPIPFFPGPPFVYPWSPAWNGIPAMAAAVCAAPATAEAAISSEHGTASSTVQWNVPPAIVPVLPPGFCGPIPVPVIPPPSVWPLITPWPNAAWSAPWLGPSASVPPGSSRSSGSSTCSDSGCGSGSPVLGKHSRESRPQGDEKAERRCLWIPKTLRIDDPVEAAKSSIWTTLGIEPGDRGMFRPFQSKHGRQQELQASGAARALQANPAALSRSQSFQETT

SEQ ID NO: 295 - protein, 317 aa, Arabidopsis thaliana
  misc_feature (51)..(113): Pfam Name: zf-Dof Pfam Description: Dof domain, zinc finger
  misc_feature: Bit score of 575.4 for HMM based on sequences of Figure 2
  misc_feature: Functional Homolog Of SEQ ID NO. 263
MNNQSVTDNTSLKLSSNLNNESKETSENSDDQHSEITTITSEEEKTTELKKPDKILPCPRCNSADTKFCYYNNYNVNQPRHFCRKCQRYWTAGGSMRIVPVGSGRRKNKGWVSSDQYLHITSEDTDNYNSSSTKILSFESSDSLVTERPKHQSNEVKINAEPVSQEPNNFQGLLPPQASPVSPPWPYQYPPNPSFYHMPVYWGCAIPVWSTLDTSTCLGKRTRDETSHETVKESKNAFERTSLLLESQSIKNETSMATNNHVWYPVPMTREKTQEFSFFSNGAETKSSNNRFVPETYLNLQANPAAMARSMNFRESI

SEQ ID NO: 296 - protein, 317 aa, Arabidopsis thaliana
  misc_feature (51)..(113): Pfam Name: zf-Dof Pfam Description: Dof domain, zinc finger
  misc_feature: Bit score of 572.5 for HMM based on sequences of Figure 2
  misc_feature: Functional Homolog Of SEQ ID NO. 263
MNNQSVTDNTSLKLSSNLNNESKETSENSDDQHSEITTITSEEEKTTELKKPDKILPCPRCNSADTKFCYYNNYNVNQPRHFCRKCQRYWTAGGSMRIVPVGSGRRKNKGWVSSDQYLHITSEDTDNYNSSSTKILSFESSDSLVTERPKHQSNEVKINAEPVSQEPNNFQGLLPPQASPVSPPWPYQYPPNPSFYHMPVYWGCAIPVWSTLDTSTCLGKRTRDETSHETVKESKNAFERTSMLLESQSIKNETSMATNNHVWYPVPMTREKTQEFSFFSNGAETKSSNNRFVPETYLNLQANPAAMARSMNFRESI

SEQ ID NO: 297 - protein, 437 aa, Oryza sativa subsp. japonica
  misc_feature (90)..(152): Pfam Name: zf-Dof Pfam Description: Dof domain, zinc finger
  misc_feature: Public GI ID no. 78708599
  misc_feature: Bit score of 570.1 for HMM based on sequences of Figure 2
  misc_feature: Functional Homolog Of SEQ ID NO. 263
MGECRGGGGGGDGLIKLFGKTIPVQPDAKDVQQHSGSSSSSTESDVQETAAVAVADPSPRSEVVDGESPPQPGGEAASHQQQQKEMKLKKPDKILPCPRCSSMDTKFCYFNNYNVNQPRHFCKHCQRYWTAGGAMRNVPVGAGRRKNKNATAAAHFLHRVRACAAAAAMPAAPHDATNATVLSFGGGGGGHDAPPVTLDLADKMTRLGKEGLVAHARNADAAAACSEVSSNRDDEQIGNTVAKPANGLQQHPPPPHHHHHSAMNGGGIWPYYTSGIAIPIYPAAPAYWGCMIPPPGAWSLPWPATVQSQAISSSSPPTSATPSVSSFTLGKHPREGGDHEARDHHGNGKVWVPKTIRIDNADEVARSSIRSLFAFRGGDKADDNNDDDGTGVHKLATTVFEPKRDSKTAKHPAITSLPLLHTNPVALTRSATFQEGS

SEQ ID NO: 298 - protein, 486 aa, Oryza sativa subsp. japonica
  misc_feature (139)..(201): Pfam Name: zf-Dof Pfam Description: Dof domain, zinc finger
  misc_feature: Public GI ID no. 15451553
  misc_feature: Bit score of 566.5 for HMM based on sequences of Figure 2
  misc_feature: Functional Homolog Of SEQ ID NO. 263
MGGGGKCKRGKRGKIAAKRRRGQCCSSSSSSGGARRRARERESEESLGEMGECRGGGGGGDGLIKLFGKTIPVQPDAKDVQQHSGSSSSSTESDVQETAAVAVADPSPRSEVVDGESPPQPGGEAASHQQQQKEMKLKKPDKILPCPRCSSMDTKFCYFNNYNVNQPRHFCKHCQRYWTAGGAMRNVPVGAGRRKNKNATAAAHFLHRVRACAAAAAMPAAPHDATNATVLSFGGGGGGHDAPPVTLDLADKMTRLGKEGLVAHARNADAAAACSEVSSNRDDEQIGNTVAKPANGLQQHPPPPHHHHHSAMNGGGIWPYYTSGIAIPIYPAAPAYWGCMIPPPGAWSLPWPATVQSQAISSSSPPTSATPSVSSFTLGKHPREGGDHEARDHHGNGKVWVPKTIRIDNADEVARSSIRSLFAFRGGDKADDNNDDDGTGVHKLATTVFEPKRDSKTAKHPAITSLPLLHTNPVALTRSATFQEGS

SEQ ID NO: 299 - protein, 338 aa, Oryza sativa subsp. indica
  misc_feature (101)..(163): Pfam Name: zf-Dof Pfam Description: Dof domain, zinc finger
  misc_feature: Public GI ID no. 125542572
  misc_feature: Bit score of 490.7 for HMM based on sequences of Figure 2
  misc_feature: Functional Homolog Of SEQ ID NO. 263
MGECKVGGGGGGGDCLIKLFGKTIPVPEPGACAAGDVDKDLQHSGSSTTEPKTQENTVQDSTSPPPQPEVVDTEDSSADKNSSENQQQQGDTANQKEKLKKPDKILPCPRCSSMDTKFCYYNNYNINQPRHFCKNCQRYWTAGGAMRNVPVGAGRRKSKSVSAASHFLQRVRAALPGDPPLYAPVKTNGTVLSFGSDLSTLDLTEQMKHLKDKFIPTTGIKNTDEMPVVSTMTNCFRLGKHPRDGDEELDSKGNGKVWVPKTVRIDDVDEVARSSIWSLIGIKGDKVGADHGRGCKLAKVFESKDEAKTSTHTAISSLPFMQGNPAALTRSVTFQEGS

SEQ ID NO: 300 - protein, 367 aa, Vitis vinifera
  misc_feature (109)..(171): Pfam Name: zf-Dof Pfam Description: Dof domain, zinc finger
  misc_feature: Public GI ID no. 157342426
  misc_feature: Bit score of 441.6 for HMM based on sequences of Figure 2
  misc_feature: Functional Homolog Of SEQ ID NO. 263
MQEPKDPAFKLFGKTIPMLADGDAPVSSGDVGDSGAAVAREDGLEEETEKDALGGKPAETKGEDGSEESRNSETVAESNENPKTPSIAEENAEKGQSDSPDSQEKTLKKPDKILPCPRCNSMDTKFCYYNNYNINQPRHFCKSCQRYWTAGGTMRNVPVGAGRRKNKNSASHYRHITISEALQTVRIEATNGVHQPTLKSNGTVLTFGSDAPFCDSMTSAKRNSHGVPSRIPCIPGIPWPYPWNSAVPPPFCPPGFPMPFYPAAYWNWDILKPSIVEDEETPKQRSSERCLWVPKTLRIDDPAEAAKSSIWTTLGIKNDKVDSVSGGGLFNAFHLKGDDKNHAIDTSAVLRANPAALSRSLNFQESS

SEQ ID NO: 301 - DNA, 1802 bp, Arabidopsis thaliana
  misc_feature: Ceres Annot ID no. 538622
  misc_feature: Encodes the peptide sequence at SEQ ID NO. 302
aaagacaaaaaagcattcccaattaacaaatctagaaatcaaaactcagacaaccaccgataacaagacagtcgtttctctctctcttttaaacaaataaaaattggaacttttttcctctgtcttctcaaaaagtttccgctttttgctcgctggagaagaaagaaagaaagaagtgaaaaggaatcattaccatggctgatccggcgattaagctctttggaaagacgattcctttacctgagcttggtgttgttgattcttcttctagctataccggatttttaaccgaaactcagattcctgttcggttatcagattcgtgtaccggcgatgatgatgatgaagagatgggtgattccggtttaggacgagaagaaggtgatgatgttggtgatggtggaggagagagcgagactgataaaaaggaagaaaaagatagtgagtgtcaggaagagtcattgaggaatgaatctaatgatgttactactactacatcgggtataactgaaaaaacggaaacaacaaaagctgcaaagacgaatgaagagtcaggtggtactgcttgctctcaagaggggaagttaaagaaacctgataagattctaccgtgtccgcgatgtaacagcatggaaaccaagttctgttactacaacaactataatgttaaccaacctcgccatttctgcaagaaatgtcagagatattggacagctggtggaacgatgaggaatgttccggttggtgctgggagacgtaagaataagagtccagcttctcattataaccgtcatgtaagtataacatctgcggaagctatgcagaaggtggcgagaactgatcttcaacatcctaatggtgcaaatcttctcacttttggctctgattctgtgctttgtgaatctatggcttctggattgaatcttgttgagaagtcattgttgaagacacaaactgtattgcaagaacccaatgaaggcttgaagattacggttccgttaaaccagacaaacgaagaagctggaacagtcagcccgttaccaaaagttccatgctttccaggaccaccaccaacttggccttacgcttggaacggagtttcgtggacgattttaccgttttaccctccaccggcttactggagctgcccgggggtttcaccgggggcatggaacagcttcacatggatgccacaacccaattcaccatctggttccaatccaaattctcctacactaggtaaacattcacgtgacgagaacgctgctgaaccaggaaccgcttttgatgaaaccgagtcacttggtagggagaaaagcaaacccgagagatgcttgtgggttcccaagacgctgaggattgatgatccagaggaagctgctaaaagttccatctgggaaacattagggatcaaaaaagacgaaaatgcggatactttcggagctttcagatcatcaaccaaagaaaaaagcagtctttctgaaggaagacttccgggaagaagaccggagttgcaagcgaatcctgctgctctttctaggtcagcaaacttccatgagagctcatagaaagaagaagaatctaagcagctgatttgattgtttttgggttcagtcttgtgttccaagaaagcaggtgagtccttttgtacatatagctatatatacacacacatgtttgtgtatatatatataatggttgacatagtgagggataagtagtttttggattgcagagtgaaagtttgttgtatcataaatgaaaaaacctcaaaactgtagttaaataaatgtatcttgcat

SEQ ID NO: 302 - protein, 457 aa, Arabidopsis thaliana
  misc_feature (133)..(195): Pfam Name: zf-Dof Pfam Description: Dof domain, zinc finger
  misc_feature: Ceres Annot ID no. 538622
  misc_feature: Bit score of 432.8 for HMM based on sequences of Figure 2
  misc_feature: Functional Homolog Of SEQ ID NO. 263
MADPAIKLFGKTIPLPELGVVDSSSSYTGFLTETQIPVRLSDSCTGDDDDEEMGDSGLGREEGDDVGDGGGESETDKKEEKDSECQEESLRNESNDVTTTTSGITEKTETTKAAKTNEESGGTACSQEGKLKKPDKILPCPRCNSMETKFCYYNNYNVNQPRHFCKKCQRYWTAGGTMRNVPVGAGRRKNKSPASHYNRHVSITSAEAMQKVARTDLQHPNGANLLTFGSDSVLCESMASGLNLVEKSLLKTQTVLQEPNEGLKITVPLNQTNEEAGTVSPLPKVPCFPGPPPTWPYAWNGVSWTILPFYPPPAYWSCPGVSPGAWNSFTWMPQPNSPSGSNPNSPTLGKHSRDENAAEPGTAFDETESLGREKSKPERCLWVPKTLRIDDPEEAAKSSIWETLGIKKDENADTFGAFRSSTKEKSSLSEGRLPGRRPELQANPAALSRSANFHESS

SEQ ID NO: 303 - DNA, 1479 bp, Solanum lycopersicum
  misc_feature: Ceres Annot ID no. 8460661
  misc_feature: Encodes the peptide sequence at SEQ ID NO. 304
atgacttgtgattcagagatcaagctgtttggcaagatactcccggtggtcgtctccggcgttggtaggggtttgtctggtagtgatggtgttatatatgatggaaatagaaatgggtctgatcttgatcgatgtttagagggaagtaaagcaagcagtgtagagaaggatgaaggaagtgagtatgaaaagcaagaagctgaaaaggataatataactggagagctcagtgaagctaaatctgaggagggagaccaaaatcagatgatagaagaatcagaaaatcctaagactccatcagaatcagagagcagtcctaaatcttcaactgaggaagaccctcaagcagtaaaatcatccaagactgagaatgaaccgactaatgtgacaaattccgagcagaacaatctgaagaagccagacaaaatcctcccatgccctcgttgcaatagtttggatacaaaattctgttactataataacaacaatgtcaaccagcctcgtcatttctgcaggagctgccagaggtattggactgccggtggtaccatgaggaatctccctgtgggagctggtcgtcgcaagaacaagaatcttgcatctcaatatcgtaatataagtatccctgaaggattactagcagcaggaattgaatctccaaatgggttaattcatcatccattattcaaaccaaatggcactattctatcgtttggtcccgacttacccctgtgtgaacctatggcttctgcattaaatcaagcagagaaaagggtatcaactggtattcaaaacggttctcataaatcagaagtcaagaattcttcttgcaaaggtggagattctggggatgagtgctgtagagggattaacatcccgactccaaatatgatggtggaagaaggtaaaggagagccccacaaggctgttatgcatagtataaatggcatcccgtctcctgttccgtgcctccatggagtaccttggccttttccatggaatgctgcagttcctgtgtcggctatttgccccattcccttccctatgccattcttccctacaccttattggaattgcagtgtgcctccttggagtaatccttggttgagtccacctctgcgagctgcaaacgagaaaacatcaggttctgatcctacttcttctttagggaaacattcaagagagggggatttgcttaagccaagcaatcctgggggcaaagaacaatcagaacaaaagtattcagaggggtctattttggtcccaaaaacattgcggattgatgatcctgatgaagctgctaagagttctatatggtcaacacttgggattaaatatgattctactaacaggggagagtttttcaaggccttgcaaccaaaaagcaatgacaagcacaacaaagccaatacatttccagtattgcatactaaccctgcagccttatctagatctatcaccttccaacaaggtgcctaa

SEQ ID NO: 304 - protein, 492 aa, Solanum lycopersicum
  misc_feature (139)..(201): Pfam Name: zf-Dof Pfam Description: Dof domain, zinc finger
  misc_feature: Ceres Annot ID no. 8460661
  misc_feature: Bit score of 432.2 for HMM based on sequences of Figure 2
  misc_feature: Functional Homolog Of SEQ ID NO. 263
MTCDSEIKLFGKILPVVVSGVGRGLSGSDGVIYDGNRNGSDLDRCLEGSKASSVEKDEGSEYEKQEAEKDNITGELSEAKSEEGDQNQMIEESENPKTPSESESSPKSSTEEDPQAVKSSKTENEPTNVTNSEQNNLKKPDKILPCPRCNSLDTKFCYYNNNNVNQPRHFCRSCQRYWTAGGTMRNLPVGAGRRKNKNLASQYRNISIPEGLLAAGIESPNGLIHHPLFKPNGTILSFGPDLPLCEPMASALNQAEKRVSTGIQNGSHKSEVKNSSCKGGDSGDECCRGINIPTPNMMVEEGKGEPHKAVMHSINGIPSPVPCLHGVPWPFPWNAAVPVSAICPIPFPMPFFPTPYWNCSVPPWSNPWLSPPLRAANEKTSGSDPTSSLGKHSREGDLLKPSNPGGKEQSEQKYSEGSILVPKTLRIDDPDEAAKSSIWSTLGIKYDSTNRGEFFKALQPKSNDKHNKANTFPVLHTNPAALSRSITFQQGA

SEQ ID NO: 305 - protein, 457 aa, Arabidopsis thaliana
  misc_feature (133)..(195): Pfam Name: zf-Dof Pfam Description: Dof domain, zinc finger
  misc_feature: Public GI ID no. 15983797
  misc_feature: Bit score of 432.1 for HMM based on sequences of Figure 2
  misc_feature: Functional Homolog Of SEQ ID NO. 263
MADPAIKLFGKTIPLPELGVVDSSSSYTGFLTETQIPVRLSDSCTGDDDDEEMGDSGLGREEGDDVGDGGGESETDKKEEKDSECQEESLRNESNDVTTTTSGITEKTETTKAAKTNEESGGTACSQEGKLKKPDKILPCPRCNSMETKFCYYNNYNVNQPRHFCKKCQRYWTAGGTMRNVPVGAGRRKNKSPASHYNRHVSITSAEAMQKVARTDLQHPNGANLLTFGSDSVLCESMASGLNLVEKSLLKTQTVLQEPNEGLKITVPLNQTNEEARTVSPLPKVPCFPGPPPTWPYAWNGVSWTILPFYPPPAYWSCPGVSPGAWNSFTWMPQPNSPSGSNPNSPTLGKHSRDENAAEPGTAFDETESLGREKSKPERCLWVPKTLRIDDPEEAAKSSIWETLGIKKDENADTFGAFRSSTKEKSSLSEGRLPGRRPELQANPAALSRSANFHESS

SEQ ID NO: 306 - protein, 551 aa, Oryza sativa subsp. japonica
  misc_feature (163)..(225): Pfam Name: zf-Dof Pfam Description: Dof domain, zinc finger
  misc_feature: Public GI ID no. 115435804
  misc_feature: Bit score of 428.4 for HMM based on sequences of Figure 2
  misc_feature: Functional Homolog Of SEQ ID NO. 263
MCDKDPGIKLFGRVIPLAPEAEAAAAADGSDQPEAAAAAAAEVEPAAQDEDHHKETEERKYDEMKVDVPQEEEDNEMKVDAPQEKKDNEVTADVPEEKGNDEMRVDASESIESIEPVSRSTLDNKKEDQGQMNNVEEKAASDSKDENEKTANDESGQDKVLKKPDKILPCPRCNSMDTKFCYYNNYNVNQPRHFCKNCQRYWTAGGTMRNVPVGAGRRKSKSSSLHYRHLLMAPDCMMGSRVEISKSMNPEAFASAHSTPIQPIGRNETVLKFGPEVPLCESMASVLNIQEQNGTNAAAVPTGENQEDNSCISSITSHNVLPENAAQVDKNSTPVYCNGVGPVPQYYLGAPYMYPWNIGWNNVPMMVPGTSMPESASQSESCSTSSAPWMNMNSPMMPVASRLSAPPFPYPLVPPALWGCLSSWPATAWNIPWIRTNGGCMSPSSSSNSSCSGNGSPLGKHSRDSSLPLKEDKEEKSLWVPKTLRIDDPDEAAKSSIWATLGIKPGDPGIFKPFQSKGESKGQAASETRPARALKANPAALSRSQSFQETS

SEQ ID NO: 307 - DNA, 2039 bp, Zea mays
  misc_feature: Ceres Clone ID no. 1599579
  misc_feature: Encodes the peptide sequence at SEQ ID NO. 308
gttttcccccaattccgcaacaccccgctactatatccattactgcctcagcctgtctctctcctccagcttggttccttcctctcgccgcttcgagagcgcgtagtcagcagcggcttgcgttcctgtcggtctcgcaggcgggagcagagcaggacgaggatgtcggatcagaaggatcctgggatcaagctcttcggccgggtgatcccgtgggggcctgaaaccgccccgggaaccacggaagtggaggacccgccgcaggatgagctgcagccacgggcgccggaggttgccgcggcggtggatgaggatgaacacaatgagaaggaagagaaaaatgctaatgaagtggttgtcatgccacaagagaagggtaaagaaaccaaggttgacacgccacaagaggagaagggtaatgaaatggaggttgacgcgccacaaaaggaacatgacgacgaaatgaaaattgacgcacaacgagaggaaaaagacgaacaaacggatgccaacgcatcaccaacgcatggaaatatagaaccagccaatctacctccctcaggcctgatggacagtgccgaagataaagcagcatcagatgcaaagggggagaacgagaagacatcaaatgaggaatcaggccaggacaaggcacttaataagaagccagataagatcctaccttgccctcggtgcaacagcatggatacaaagttctgctattacaacaactacaacgtgaatcaaccaaggcacttctgcaagaactgccagcggtactggactgcagggggcaccatgaggaacgtacctgttggtgccgggcggcgcaagagtaagaacgcgtcattgcactaccgtcaattactgatggcccctgactgtatgctggggcctagagtggacatatcaaagccagtgctccctgaagctcttgcatcatctccacctgccccgacacagccagccagtagaaatggaacggtcctaaaatttgggcctgaggtaccattttgcgagtcaatggtgtcggcgctgaacattgatgagcagaacgtgaacagccctggaggaccaacagcaagaggtgaaaacagggaagataataataaccctggatccggcacaccaccatacaacggtgtgcctgaaaccatggcccccgtcgtcggcaagaacggggcaccagttcattgtaacggggttgccccagtgcctcagtattaccttggaacccctttcatgtacccttggagtgtaggatggagcaacgtgcctgtgatggtgccaggtaaaagcatgcccgaacctgctcctgctccagagagctgcagtactagctcagctgtatggatgaaccctcccatgatgccgggctcaagacctcctagcccagcgtttccataccctctcgtgccacccgggctctggggctgtttttccggatggccacccacggcttggaacgtaccatggaccagaaccaacgtctccgtgtcgccgccgccatcgccatcaagcaacagcagcagctgctcgggcaacgggtctcctactctgggcaagcattccagggacaccaatccgctgagagaggagaaaagagagaagtcgctgtgggttcccaagacgctccggatcgatgaccctgatgacgccgccaagagttcgatatgggccaccctcggcatcaagcccggtgaccctggcactttcatcaagcctttccagtccaaggtcgagagcaagggccagaggtcggacgctgctcaggtcttgcaggcgaacccagcggcgttgtcgcgcttacagtcgttccaggagagctcttgacttcatacgcaaagtctgccttatatagttatatatagttttggtactgtaatccttacatgctggtagagttttgtggcatgtggaaagtgacttcatacctgcagcctatcttattgtttgtttcggtactgtattccttactgcatgctagtagagctgtgcggtatgtggaaaggtcaacagagagcttcttgtttagccac

SEQ ID NO: 308 - protein, 556 aa, Zea mays
  misc_feature (168)..(230): Pfam Name: zf-Dof Pfam Description: Dof domain, zinc finger
  misc_feature: Ceres Clone ID no. 1599579
  misc_feature: Bit score of 418.6 for HMM based on sequences of Figure 2
  misc_feature: Functional Homolog Of SEQ ID NO. 263
MSDQKDPGIKLFGRVIPWGPETAPGTTEVEDPPQDELQPRAPEVAAAVDEDEHNEKEEKNANEVVVMPQEKGKETKVDTPQEEKGNEMEVDAPQKEHDDEMKIDAQREEKDEQTDANASPTHGNIEPANLPPSGLMDSAEDKAASDAKGENEKTSNEESGQDKALNKKPDKILPCPRCNSMDTKFCYYNNYNVNQPRHFCKNCQRYWTAGGTMRNVPVGAGRRKSKNASLHYRQLLMAPDCMLGPRVDISKPVLPEALASSPPAPTQPASRNGTVLKFGPEVPFCESMVSALNIDEQNVNSPGGPTARGENREDNNNPGSGTPPYNGVPETMAPVVGKNGAPVHCNGVAPVPQYYLGTPFMYPWSVGWSNVPVMVPGKSMPEPAPAPESCSTSSAVWMNPPMMPGSRPPSPAFPYPLVPPGLWGCFSGWPPTAWNVPWTRTNVSVSPPPSPSSNSSSCSGNGSPTLGKHSRDTNPLREEKREKSLWVPKTLRIDDPDDAAKSSIWATLGIKPGDPGTFIKPFQSKVESKGQRSDAAQVLQANPAALSRLQSFQESS

SEQ ID NO: 309 - DNA, 1485 bp, Populus balsamifera subsp. trichocarpa
  misc_feature: Ceres Annot ID no. 1469831
  misc_feature: Encodes the peptide sequence at SEQ ID NO. 310
atgaagggtgagtctaaagatccagctttcaagctctttggtaggaagattcctgtacctgatactcagtttccggccgaaccactagccaagggaacctgcagtgagataacaagagtagaaaccaagggtcctagtgaagacatctcagaagaacctgaaatgttctctggttctggacaaggcaaggaagaaagccaagctgcaatgcgagtgaatgaggcacaagtaattgctaagcataaggaaggtccactggagactaatggcacagaccaagagaaagtccttaagaagccagataaaattctaccatgtccacgatgcaacagtttagacacaaaattctgttacttcaataactataatgtcaaccaaccaaggcatttctgcaagaattgccaaagatattggacagctgggggatcaatgagaaatgtccctattggtgctggccggcggaagaataagcacttagccactcaatatcgtcagatattagtatcttctgatgggatgcctattgccagaatggaaaactcagactcaatcggtcaccaacttcaatcttctgttgaatccggaaccaccttgagtccctcagtagcaaatggaatggttctaaaattcggtcatgaagcacctctttgtgattccatggagaatgtgctgaatcttggagaccaaaagagatatgttgagataagttcagtcaatcgtcaagataatgtagaagagccgtcttcatgtggatcctccaagacagcttccaatgcttgggcaaacgaattgcgagaaaatattatgcagaaagagcaagttgatgtgccagcatcttctaacgaactcagcgcaccaaattccctgccttattattctgttccttcatgggtttttccttggaacccgggttggaataatgttgcttccatgaccgcagctcagcactccactggccaggcttgcgtgacaaatattcccaatcaagttcaattgtgctccacaccaatgttggctgttcccagcatttgccctccaaacattcctttacaatttgtacccgcttcttattggggttgcatgcccacatgggctgctggaacaagaaatgtatcattgagtggatcgaatggctgcctttctctatcaacctctgctaacaccagttcctgctcaggaaatggctcaccaaccctaggcaagcattctagagattcaaaatttatggaagaagagaaggcagaaaaatgtatattggtcccaaaaacactaagaattgatgacccaagtgaggcttcaaagagtcctttatgggctacattaggtcttaagcctgaccagaaggatcccgcatcaaaaggtactatcttcaagaattttgaaaccaaagcagaatgctatggccatgtatctgatatcactcatgtactggaagcaaacccagcagctctttctcgctctcatacattccaggagagtggctaa

SEQ ID NO: 310 - protein, 494 aa, Populus balsamifera subsp. trichocarpa
  misc_feature (99)..(161): Pfam Name: zf-Dof Pfam Description: Dof domain, zinc finger
  misc_feature: Ceres Annot ID no. 1469831
  misc_feature: Bit score of 411.8 for HMM based on sequences of Figure 2
  misc_feature: Functional Homolog Of SEQ ID NO. 263
MKGESKDPAFKLFGRKIPVPDTQFPAEPLAKGTCSEITRVETKGPSEDISEEPEMFSGSGQGKEESQAAMRVNEAQVIAKHKEGPLETNGTDQEKVLKKPDKILPCPRCNSLDTKFCYFNNYNVNQPRHFCKNCQRYWTAGGSMRNVPIGAGRRKNKHLATQYRQILVSSDGMPIARMENSDSIGHQLQSSVESGTTLSPSVANGMVLKFGHEAPLCDSMENVLNLGDQKRYVEISSVNRQDNVEEPSSCGSSKTASNAWANELRENIMQKEQVDVPASSNELSAPNSLPYYSVPSWVFPWNPGWNNVASMTAAQHSTGQACVTNIPNQVQLCSTPMLAVPSICPPNIPLQFVPASYWGCMPTWAAGTRNVSLSGSNGCLSLSTSANTSSCSGNGSPTLGKHSRDSKFMEEEKAEKCILVPKTLRIDDPSEASKSPLWATLGLKPDQKDPASKGTIFKNFETKAECYGHVSDITHVLEANPAALSRSHTFQESG

SEQ ID NO: 311 - protein, 515 aa, Arabidopsis thaliana
  misc_feature (133)..(195): Pfam Name: zf-Dof Pfam Description: Dof domain, zinc finger
  misc_feature: Public GI ID no. 9758342
  misc_feature: Bit score of 404.5 for HMM based on sequences of Figure 2
  misc_feature: Functional Homolog Of SEQ ID NO. 263
MADPAIKLFGKTIPLPELGVVDSSSSYTGFLTETQIPVRLSDSCTGDDDDEEMGDSGLGREEGDDVGDGGGESETDKKEEKDSECQEESLRNESNDVTTTTSGITEKTETTKAAKTNEESGGTACSQEGKLKKPDKILPCPRCNSMETKFCYYNNYNVNQPRHFCKKCQRYWTAGGTMRNVPVGAGRRKNKSPASHYNRHVSITSAEAMQKVARTDLQHPNGANLLTFGSDSVLCESMASGLNLVEKSLLKTQTVLQEPNEGLKITVPLNQTNEEAGTVSPLPKVPCFPGPPPTWPYAWNGVSWTILPFYPPPAYWSCPGVSPGAWNSFTWMPQPNSPSGSNPNSPTLGKHSRDENAAEPGTAFDETESLGREKSKPERCLWVPKTLRIDDPEEAAKSSIWETLGIKKDENADTFGAFRSSTKEKSSLSEGRLPGRRPELQANPAALSRKQTNSNKFKGTFIVIHMMYDSQNLESDLTYWTSVVVAATSLFSASAEERTTVFNFLDDRDVKCLPW

SEQ ID NO: 312 - protein, 447 aa, Arabidopsis thaliana
  misc_feature (105)..(167): Pfam Name: zf-Dof Pfam Description: Dof domain, zinc finger
  misc_feature: Public GI ID no. 21536859
  misc_feature: Bit score of 401.2 for HMM based on sequences of Figure 2
  misc_feature: Functional Homolog Of SEQ ID NO. 263
MMMETRDPAIKLFGMKIPFPSVFESAVTVEDDEEDDWSGGDDKSPEKVTPELSDKNNNNCNDNSFNNSKPETLDKEEATSTDQIESSETPEDNQQTTPDGKTLKKPTKILPCPRCKSMETKFCYYNNYNINQPRHFCKACQRYWTAGGTMRNVPVGAGRRKNKSSSSHYRHITISEALEAARLDPGLQANTRVLSFGLEAHQQHVAPMAPVMKLQGDQKVSNGARNGFHGLADQRLVARVENGDDCSSGSSVTTSNNHSVDESRAQSGRIVEPQMNNNNNMNGYACIPGVPWPYTWNPAMPPPGFYPPPGYPMPFYPYWTIPMISPSPHQSSSPISQKDSNTNSPTLGKRSRDEESSKRDSETERKQRTGCILVPKTLRIDDPNEAAKSSIWTTLGIKNEAMCKAGGMFKGFDHKTKMYNNDKAENSPVLSANPAALSRSHNFHEQI

SEQ ID NO: 313 - DNA, 1535 bp, Arabidopsis thaliana
  misc_feature: Ceres Clone ID no. 113639
  misc_feature: Encodes the peptide sequence at SEQ ID NO. 314
accaattcacactctcccaaatctctcttctttaaatacaacaaaaaaaaaaatcacagagacatagagagaagaagaaacagagactccaaaaaaatgatgatggagactagagatccagctattaagcttttcggtatgaaaatcccttttccgtcggtttttgaatcggcagttacggtggaggatgacgaagaagatgactggagcggcggagatgacaaatcaccagagaaggtaactccagagttatcagataagaacaacaacaactgtaacgrcaacagttttaacaattcgaaacccgaaaccttggacaaagaggaagcgacatcaactgatcagatagagagtagtgagacgcctgaggataatcagcagacgacacctgatggtaaaaccctgaagaaaccgactaagattctgccgtgtccgagatgtaaaagcatggagaccaagttctgttattacaacaactacaacataaaccagcctcgtcatttctgcaaggcttgtcagagatattggactgctggagggactatgaggaatgttcctgtgggggcaggacgtcgtaagaacaaaagctcatcttctcattaccgtcacatcactatttccgaggctcttgaggctgcgaggcttgatccgggtttgcaggcaaacacaagggtcttgagttttggtctcgaagctcatcagcagcatgttgctcctatggcacctgtgatgaagctacaaggagatcaaaaggtctcaaacggagctaggaacgggtttcatgggttagcggatcaacggcttgtagctcgggtagagaatggagatgactgctcaagcggatcctctgtgaccacctctaacaatcactcagtggatgaatcaagagcacaaagcggcagaattgttgaaccacaaatgaacaacaataacaacatgaatggttatgcttgcatcccaggtgttccatggccttacacgtggaatccagcgatgcccccaccaggtttttacccgcctccagggtatccaatgccgttttacccttactggaccatcccaatgatatcaccgtcaccgcatcaatcctcatcgcctatcagccaaaaggattcaaatacaaactctcccactctcggaaaacgctcgagagatgaagaatcatcgaaaagggacagtgagacagagcgaaaacagaggaccgggtgcattctggtcccgaaaacgttgagaatagatgatcctaacgaagcagcaaagagctcgatatggacaacattgggaatcaagaacgaggcgatgtgcaaagccggtggtatgttcaaagggtttgatcataagacaaagatgtataacaacgacaaagccgagaactcccctgttctttctgctaaccctgctgctctatcaagatcacacaatttccatgaacagatttagagttacatatgtatatgtatatatgtatgattgattgtatgtatagatgatattggagaatgatgagtttttgagaatcaaactcttttcttctt

SEQ ID NO: 314 - protein, 447 aa, Arabidopsis thaliana
  misc_feature (105)..(167): Pfam Name: zf-Dof Pfam Description: Dof domain, zinc finger
  misc_feature: Ceres Clone ID no. 113639
  misc_feature: Bit score of 400.8 for HMM based on sequences of Figure 2
  misc_feature: Functional Homolog Of SEQ ID NO. 263
  misc_feature (62)..(62): Xaa is any aa, unknown, or other
MMMETRDPAIKLFGMKIPFPSVFESAVTVEDDEEDDWSGGDDKSPEKVTPELSDKNNNNCNXNSFNNSKPETLDKEEATSTDQIESSETPEDNQQTTPDGKTLKKPTKILPCPRCKSMETKFCYYNNYNINQPRHFCKACQRYWTAGGTMRNVPVGAGRRKNKSSSSHYRHITISEALEAARLDPGLQANTRVLSFGLEAHQQHVAPMAPVMKLQGDQKVSNGARNGFHGLADQRLVARVENGDDCSSGSSVTTSNNHSVDESRAQSGRIVEPQMNNNNNMNGYACIPGVPWPYTWNPAMPPPGFYPPPGYPMPFYPYWTIPMISPSPHQSSSPISQKDSNTNSPTLGKRSRDEESSKRDSETERKQRTGCILVPKTLRIDDPNEAAKSSIWTTLGIKNEAMCKAGGMFKGFDHKTKMYNNDKAENSPVLSANPAALSRSHNFHEQI

SEQ ID NO: 315 - protein, 448 aa, Arabidopsis thaliana
  misc_feature (105)..(167): Pfam Name: zf-Dof Pfam Description: Dof domain, zinc finger
  misc_feature: Public GI ID no. 15232818
  misc_feature: Bit score of 399.6 for HMM based on sequences of Figure 2
  misc_feature: Functional Homolog Of SEQ ID NO. 263
MMMETRDPAIKLFGMKIPFPSVFESAVTVEDDEEDDWSGGDDKSPEKVTPELSDKNNNNCNDNSFNNSKPETLDKEEATSTDQIESSDTPEDNQQTTPDGKTLKKPTKILPCPRCKSMETKFCYYNNYNINQPRHFCKACQRYWTAGGTMRNVPVGAGRRKNKSSSSHYRHITISEALEAARLDPGLQANTRVLSFGLEAQQQHVAAPMTPVMKLQEDQKVSNGARNRFHGLADQRLVARVENGDDCSSGSSVTTSNNHSVDESRAQSGSVVEAQMNNNNNNNMNGYACIPGVPWPYTWNPAMPPPGFYPPPGYPMPFYPYWTIPMLPPHQSSSPISQKCSNTNSPTLGKHPRDEGSSKKDNETERKQKAGCVLVPKTLRIDDPNEAAKSSIWTTLGIKNEAMCKAGGMFKGFDHKTKMYNNDKAENSPVLSANPAALSRSHNFHEQI

SEQ ID NO: 316 - DNA, 1989 bp, Zea mays
  misc_feature: Ceres Clone ID no. 1571328
  misc_feature: Encodes the peptide sequence at SEQ ID NO. 317
gcttgtggctgtgcacccctcgccgtggcccccacccaccttcttcccctcttatacccgctcgcctgtccatagcaggcagcagcacaccataccagatttgagatttcaatgaccttccttttgccggcctcctcgtctcctccggttccggctacctacctgcgggacgtcgacctcgtccgtctgtcgcctagctagctgcctcggttttcgcttgaagcagcagcagcagcaagccgggagcttctgtgtttgtttcgatcggagtgagaagaagatggttgcggagtgccaaggaggaggagacttcctcatcaagctcttcgggaagaccatccccgtgccggagccggagccggagtccggcgacgccaaggatcttcagcagagcagcagcaactggacggagatcgtggacgccgatgacgaccccaagaagcacagcgacggcgacgctgccaggcagagggagaagctgagggagcccgacaaggtgctgccgtgcccgcgctgtaacagcgcggacaccaagttctgctacttcaacaactacaacgcgaagcagccgcgccacttctgcaagcgctgccagcgctactggaccgcgggcggcgccatgcgcaacgtgccagtgggggccggccgccgcaagaacaagaacgccgccgcctcgcactcgcacctcctccataggacgacgacgactgccaacggcgcgatgctcagcttcgcccctcccggtcctggccttgcctgcctctgcctggacctcgccgcgcagttcggccacctggccccggtcagggacgccgccgggaccccgtctcgtccttgcacttgcagcgaagggtcgaccgacagggacggcacgtcttccgtcgtagacgaatctgcagcaagcggggacggaccagtgcagctgcaccaccacccagcaagcgttaacaccgggtggccgccatacagcagcccacctccggcggcgccgtatttctcgccgggcatctcgattccggtataccccgccgcgccggggtactggggctgcatggttcccggggcttggagcctgccatggccggtgcagccgcagcccccgtcgtcgcggtcgcaggggcagggcctctcgtcgtcgtcgtcgccgccgccgcccaccaccaccaccatcggtactccttcagtctcatcatcatccggggccgctgactttgactcccacgccctggggctgggcctgggcaagcacccgcgggaccgggacggcgacgacgggaggaagaggaacggcagtgcccatggcagcggcagcgccaaggtgtgggctcccaagaccatccggatagacgatgtggacgaggtggccaggagctccatctggtccctcgtcggggtcagaggcgacagggagcagcagggcgcagccgcgcaggtgacaagctcgggacagtgttcgagcccaggggcctgcaggccaccaagaaggccatggcgacaagctcgccgctccttcacgccaaccccgtcgcgctcacgcgctcggtggcgttccatgagggctcttgattttgccatctcaacatgatgctcctaatcagactgacagcactgatttgttttggataaatcatcagaggacccctcacatgcacgctgattcacatacctctttggttgcgtaggagaatcagactcctcgtatgcattgaccataactcgactcatgtttagtacgctgcatcttaaaaactgagcacacatacactggtgcaacctaatgttatttaggtgcacctgtagatacccagaaaacttacgtattcgggcggccaggctcacacgagcctcccatgcaagcagagatccaatcacactggtagctacttgtggacggcggggcggcacgcaatttggatgggagaaagaacaggagatcaataagaggttcctgctcgtagataaataaataacattatctaactttttcat

SEQ ID NO: 317 - protein, 434 aa, Zea mays
  misc_feature (69)..(131): Pfam Name: zf-Dof Pfam Description: Dof domain, zinc finger
  misc_feature: Ceres Clone ID no. 1571328
  misc_feature: Bit score of 398.3 for HMM based on sequences of Figure 2
  misc_feature: Functional Homolog Of SEQ ID NO. 263
MVAECQGGGDFLIKLFGKTIPVPEPEPESGDAKDLQQSSSNWTEIVDADDDPKKHSDGDAARQREKLREPDKVLPCPRCNSADTKFCYFNNYNAKQPRHFCKRCQRYWTAGGAMRNVPVGAGRRKNKNAAASHSHLLHRTTTTANGAMLSFAPPGPGLACLCLDLAAQFGHLAPVRDAAGTPSRPCTCSEGSTDRDGTSSVVDESAASGDGPVQLHHHPASVNTGWPPYSSPPPAAPYFSPGISIPVYPAAPGYWGCMVPGAWSLPWPVQPQPPSSRSQGQGLSSSSSPPPPTTTTIGTPSVSSSSGAADFDSHALGLGLGKHPRDRDGDDGRKRNGSAHGSGSAKVWAPKTIRIDDVDEVARSSIWSLVGVRGDREQQGAAAQVTSSGQCSSPGACRPPRRPWRQARRSFTPTPSRSRARWRSMRALDFAIST

SEQ ID NO: 318 - DNA, 1288 bp, Panicum virgatum
  misc_feature: Ceres Clone ID no. 1868988
  misc_feature: Encodes the peptide sequence at SEQ ID NO. 319
gacacaaattgggcaaatctttttaccctttctggcgtcgccaactccacttgtcggatcttgcccatatgctatggagctcgccggagccgcgtcccctcggtcgccggaatcccacgtggcgccgccccgcccgcctccgcagccgccggagaaggatgcatgcgaagatacaggggacatgagtattactggggaaaagccatgcacacatcaggagttagactttggtcagacaaatagttctagccttaacagttccagtgagcgtgagaatcaggcacccagcaatgacgaaatgactggatcagagtccaatttggagacagccaagactgagggcgatgtaccgagtggagagaaggtcctgaagaaaccagataagatcctgccatgccctcgttgcaacagcatggatacaaagttctgttattacaacaactacaacattaagcaaccaaggcatttttgcaagagttgtcagaggtactggactgcaggtgggagcatgagaaatattcctgtcggtgctggtaggcgcaagagcaagagctctagttcgaattgccgcagcatattgattcccggcagtagtgtagccactcctgtgggagagtctaccctctttccattgcctatcaacggaaatcaagcagcagttaacttcgggcctgattcccctctctgcaactccatggcctcggtgctgaagattggaggggagcagagtaagaatgccaaccctgcctcaacagcacagccaagaaatggagaaacccagatttgcccaccttctacgacaacatcagacggtcctcggagtgaatctcataaaggaacagtgagtgcacatcagaatggagttgttgggcatggcaacggggtcacttccatgcatcctataccattcttccctggccctccttttgtgtacccatggagtccagcatggaatggcgttcctgccgcggcagcaccggtatgcccagccccagcagaagctgtgaattcttcagaaaatggcaacagtagtagtagtgttcaatggaattttccaccattggtgtcggtactgccaccaggattctgcggtgcacctattccagttcctgtaatgccatcttcagtttggccattcattacgccttggcccaatggagcatggaacacaccatggctcggacctggcgtgtcagcatcatctcccacaggcagcaccacatgttcagatagcgggtcacctgtcctggggaaacactcaagagactccagacctcaaggtgatgag

SEQ ID NO: 319 - protein, 405 aa, Panicum virgatum
  misc_feature (101)..(163): Pfam Name: zf-Dof Pfam Description: Dof domain, zinc finger
  misc_feature: Ceres Clone ID no. 1868988
  misc_feature: Bit score of 389.4 for HMM based on sequences of Figure 2
  misc_feature: Functional Homolog Of SEQ ID NO. 263
MELAGAASPRSPESHVAPPRPPPQPPEKDACEDTGDMSITGEKPCTHQELDFGQTNSSSLNSSSERENQAPSNDEMTGSESNLETAKTEGDVPSGEKVLKKPDKILPCPRCNSMDTKFCYYNNYNIKQPRHFCKSCQRYWTAGGSMRNIPVGAGRRKSKSSSSNCRSILIPGSSVATPVGESTLFPLPINGNQAAVNFGPDSPLCNSMASVLKIGGEQSKNANPASTAQPRNGETQICPPSTTTSDGPRSESHKGTVSAHQNGVVGHGNGVTSMHPIPFFPGPPFVYPWSPAWNGVPAAAAPVCPAPAEAVNSSENGNSSSSVQWNFPPLVSVLPPGFCGAPIPVPVMPSSVWPFITPWPNGAWNTPWLGPGVSASSPTGSTTCSDSGSPVLGKHSRDSRPQGDE

SEQ ID NO: 320 - protein, 380 aa, Cucurbita maxima
  misc_feature (35)..(97): Pfam Name: zf-Dof Pfam Description: Dof domain, zinc finger
  misc_feature: Public GI ID no. 1669341
  misc_feature: Bit score of 378.8 for HMM based on sequences of Figure 2
  misc_feature: Functional Homolog Of SEQ ID NO. 263
MNPEVLSTDENDKLATRKTEKEQNDAPNSKEKLKKPDKILPCPRCNSMETKFCYYNNYNVNQPRHFCKACQRYWTEGGTIRNVPVGAGRRKNKNSASHYRHITISEALRAAQIDVPIEVNHLASKGNGRVLNFSVSPPVCESMVNVSHPAERKVLNGTRNEFEGAKGPCEGGETGDDCSSASSVTMSSSMKNGARRFPQEPHMQNINGFPSQIPCLPGVPWPCSWTAPIPPPALCPPGVPLSFYPATYWSCSASGSWNIPWVTPQPCPPIPGPNSPTLGKHSRDGDELQADNSEMKDPPKQKNGSVLVPKTLRIDDPNEAAKSSIWETLGIKNDSIKAVDLSNVFQSKGDLKSNVSEVLSPVLQANPAALSRSLTFHERS

SEQ ID NO: 321 - protein, 420 aa, Vitis vinifera
  misc_feature (24)..(86): Pfam Name: zf-Dof Pfam Description: Dof domain, zinc finger
  misc_feature: Public GI ID no. 157359317
  misc_feature: Bit score of 346.9 for HMM based on sequences of Figure 2
  misc_feature: Functional Homolog Of SEQ ID NO. 263
MSGLQVHKDQGETNSSAQEKVLKKPDKILPCPRCNSLETKFCYFNNYNVNQPRHFCKNCQRYWTAGGTMRNVPVGAGRRKNKHLASQYRQIMVSSDGVPTTVIEASDSSNQQILSCGETSTTFRPSTASGTVLKFGPEAPLCKSMETVLSIREQKRCAEMRTVNCGGNGEEPSSCASSVSAPSFPENEFPENVGHKDRPSLPASRSEIHPQLHQPCYPVPPWAFPWNPGWTNVAPVAPPQCSSDTVYAPNNSNPNSVQWCSRPMLAVPGFCAPTIPLQLVPPSYWGCMPIWGAGTGNISLAGSNDCLSPSSSTSNSCSGNASPTLGKHSRDAQPAEEQKLEKCVLVPKTLRIIDPDEASKSSIWATLGIKPDQKAPISKGGIFKAFEPKSGAKTDLSDATQVLEANPAALSRSQTFKEST

SEQ ID NO: 322 - DNA, 458 bp, Glycine max
  misc_feature: Ceres Clone ID no. 638126
  misc_feature: Encodes the peptide sequence at SEQ ID NO. 323
tttatcagtcatggcgtcaagctctctcagcaaacaaaaggcttctgactcctcttggacaccaaaacagaacaagctgtttgaaaaagcacttgcaaaatatgacaaggatacccctgaccgatggcagaatgtagccaaagcagtaggtggaaaatctgcagatgaagttaagagacactatgaaatcctcttggaggatctgagacacattgagtctggtcatgttcctcttcccaagtacaagtccacaggaagcagcaccaatgttgaggaagaagagaggcttctgaagtatcttaaactgaattgatggaagcaatgtttatgttatcctcagctattggcagaatttatgtggccatccttgaatctgcggaaatatcttccctctctgttctatttcctgccattgtaatttagattgtttcaaatttcaatgaattatcctattctag

SEQ ID NO: 323 - protein, 100 aa, Glycine max
  misc_feature (13)..(62): Pfam Name: Myb_DNA-binding Pfam Description: Myb-like DNA-binding domain
  misc_feature: Ceres Clone ID no. 638126
  misc_feature: Bit score of 196.0 for HMM based on sequences of Figure 7
MASSSLSKQKASDSSWTPKQNKLFEKALAKYDKDTPDRWQNVAKAVGGKSADEVKRHYEILLEDLRHIESGHVPLPKYKSTGSSTNVEEEERLLKYLKLN

SEQ ID NO: 324 - protein, 96 aa, Vitis vinifera
  misc_feature (9)..(58): Pfam Name: Myb_DNA-binding Pfam Description: Myb-like DNA-binding domain
  misc_feature: Public GI ID no. 157340812
  misc_feature: Bit score of 192.4 for HMM based on sequences of Figure 7
  misc_feature: Functional Homolog Of SEQ ID NO. 323
MASGSRMGSGLWTSKQNKLFEKALALYDKDTPDRWQNVAKAVGGKSAEEVKRHYEILIEDLKHIESGHVPIPNYKSTGSNSIGDQEQRLLKCIKLQ

SEQ ID NO: 325 - DNA, 375 bp, Populus balsamifera subsp. trichocarpa
  misc_feature: Ceres Annot ID no. 1460824
  misc_feature: Encodes the peptide sequence at SEQ ID NO. 326
atgtcttcaagctatcaagcttccagaaattctagatccgcttggacaccaagggaaaacaaactgtttgaaaaggcactagccttgtttgataaggacacaccggacaggtggcaaaatatagccaaagctgttggtggtgtgaaatctgccgaggaagtgaagaaacactatgaaatccttattgaagatcttcaacatatcgagtctggccgcattcctattcctaagtacaagtctagtggaagctgcaacaacacaaacgaagaggaaagtgaagttaataagaacaaactgcagatggcaactggcaatctccatattgactcattgagagtcctccaggatttcatggcagggtgtaatcaacattaa

SEQ ID NO: 326 - protein, 124 aa, Populus balsamifera subsp. trichocarpa
  misc_feature (12)..(62): Pfam Name: Myb_DNA-binding Pfam Description: Myb-like DNA-binding domain
  misc_feature: Ceres Annot ID no. 1460824
  misc_feature: Bit score of 189.9 for HMM based on sequences of Figure 7
  misc_feature: Functional Homolog Of SEQ ID NO. 323
MSSSYQASRNSRSAWTPRENKLFEKALALFDKDTPDRWQNIAKAVGGVKSAEEVKKHYEILIEDLQHIESGRIPIPKYKSSGSCNNTNEEESEVNKNKLQMATGNLHIDSLRVLQDFMAGCNQH

SEQ ID NO: 327 - protein, 100 aa, Arabidopsis thaliana
  misc_feature (11)..(60): Pfam Name: Myb_DNA-binding Pfam Description: Myb-like DNA-binding domain
  misc_feature: Public GI ID no. 145356202
  misc_feature: Bit score of 191.8 for HMM based on sequences of Figure 7
  misc_feature: Functional Homolog Of SEQ ID NO. 323
MASSSMSSQSSGSWTAKQNKAFEQALATYDQDTPNRWQNVAKVVGGKTTEEVKRHYELLVQDINSIENGHVPFPNYRTSGGCTNGRLSQEEKRMRNMRLQ

SEQ ID NO: 328 - DNA, 729 bp, Glycine max
  misc_feature: Ceres Clone ID no. 477814
  misc_feature: Encodes the peptide sequence at SEQ ID NO. 329
atcaactcttccttgagtctgatcactatatacacactactcttcagccttttcatatttcataacacccctttgctaccaaaccaattcagtgatctttttgctttgctctttcctgagtttgaaaaccttagaaccatttcagtacacaacactttctgttccttaatggcatccagttcaatctcagcctctggctcatggagtgttaaggacaacaaggcctttgaaaaggctttagctgtttatgacaaggacactcctgaccgttggtacaatgttgctcatgctgttggtggcaaaactccagaggaagtgaaaaggcactacgaactccttgttcaggatgttaagcatattgagtctggacgtgtgccattcccaaattacaagaaaactacttcagggtcaactgatcaggaggaaaaaaggctgaggaatttgaatttgaacctccagtgacccccctcaagaacaacaaattgattttctaattttcatatcaaccaacatcattaatttccagcatccctggtagtactacgtggtgttatgtcacacataattgctagtgcaatagcatcttaggctatattagtcatcataagaatcatatgtcccgtgattccatctggtactttcttgtcgttgaagcttcctcttgaaagggtcaacgaccgtttcagttcctcatcgtcctaaataaatttataattttataatatgctg

SEQ ID NO: 329 - protein, 97 aa, Glycine max
  misc_feature (9)..(58): Pfam Name: Myb_DNA-binding Pfam Description: Myb-like DNA-binding domain
  misc_feature: Ceres Clone ID no. 477814
  misc_feature: Bit score of 185.2 for HMM based on sequences of Figure 7
  misc_feature: Functional Homolog Of SEQ ID NO. 323
MASSSISASGSWSVKDNKAFEKALAVYDKDTPDRWYNVAHAVGGKTPEEVKRHYELLVQDVKHIESGRVPFPNYKKTTSGSTDQEEKRLRNLNLNLQ

SEQ ID NO: 330 - DNA, 735 bp, Gossypium hirsutum
  misc_feature: Ceres Clone ID no. 1914387
  misc_feature: Encodes the peptide sequence at SEQ ID NO. 331
accatcatccccttgacttcagtcttctcccttgacgggggcggcaatctcttcttcttcttcttccttcttagctactttctcttttgtcggttactcttcctttaagatctcatcttgaaagtcttacattcccttttttattcacccccaacgtaaaaaatggcatcctctattacgctttcacgtgattctaactcctactggactccaaagcaaaacaagctatttgaaagggcacttgctgtatatgacaaggacactccagaccgctggcaaaaggtggctgcagctgtgggggagaaatcagtcgaggaagtaagaaggcattatgagatcctagtgagggatctcatgtatatagaatctggtcaaatccctatacccaattacaaaagcactgggagtaacagaagatgaattgctggggtgcaaaggtttatgaagaatctaaggctccaatgaagcacaagtttcagctgcactgtcagagaatctgtaaaaactaaaataaaaagaataaattataaagaactggagaatttgcatcgtgattctccctgtcttattttacattgagtgatcgagtcagtttggttttttctttttgtgtgtgtgtgtcagtttgttaatatgacaacaaaagttgaactctacaattattaaatttgtgagtattgtactgaagttaccagttttaaattaaaaaaaaaaggtattactactaaatgctgg

SEQ ID NO: 331 - protein, 85 aa, Gossypium hirsutum
  misc_feature (12)..(61): Pfam Name: Myb_DNA-binding Pfam Description: Myb-like DNA-binding domain
  misc_feature: Ceres Clone ID no. 1914387
  misc_feature: Bit score of 158.6 for HMM based on sequences of Figure 7
  misc_feature: Functional Homolog Of SEQ ID NO. 323
MASSITLSRDSNSYWTPKQNKLFERALAVYDKDTPDRWQKVAAAVGEKSVEEVRRHYEILVRDLMYIESGQIPIPNYKSTGSNRR

SEQ ID NO: 332 - protein, 88 aa, Solanum lycopersicum
  misc_feature (11)..(60): Pfam Name: Myb_DNA-binding Pfam Description: Myb-like DNA-binding domain
  misc_feature: Public GI ID no. 7981380
  misc_feature: Bit score of 162.1 for HMM based on sequences of Figure 7
  misc_feature: Functional Homolog Of SEQ ID NO. 323
MSSMSSQHGSSGSWTAKQNKAFEKALAVYDKETRDRWSNVAKAVGGKTAEEVKRHYEILLRDVFFIDNGMVPFPKYKTTGGSHNSTSD

SEQ ID NO: 333 - DNA, 749 bp, Panicum virgatum
  misc_feature: Ceres Clone ID no. 1910072
  misc_feature: Encodes the peptide sequence at SEQ ID NO. 334
atcagctcatcagctcttgatctctagctagctagagagataagcttcctctcttcctctcggtcgagggagtgatcctctctcactctcaccaggagctcagctcgggtagctcaaggaggccagaagaagaaatggcgtcgctgtcgatgaccagcagctcggtgcgggcgcagtggacgaagaagcagaacaagctcttcgagcaggcgttggccgtgtacgacaaggacacccccgaccggtggcacaacatcgcccgcgccgtcggcggcaagtcagccgaggaggtcaggcgctactacgagatgctggaggaggatgtcaagcacatcgagtccggcaaggtgcccctccccgcctaccgctgccccggcggcgccggcgccggcgccctcggctacgaggccgacaggatgaagcatctgaagatctaggcgaacttcagaggatggtcaagaagaggctgcgcaggcacacgtgtatatatgattgggatagcatgcatgtccatgctactcctacgcaagtggtctggaagaagcaagaagaatcagatgagatgcatgcatgtcataattaattaattaattaattaataattagtatggggatgatcgagtagtatcctagcctgtcacgcgagatcgaccgacccatcgatctcccagcatgtgtccttcgtacccacgcgcgtatgtgtattatatcctagctgcatctgtgtaccataccaatcagaaacatga

SEQ ID NO: 334 - protein, 100 aa, Panicum virgatum
  misc_feature (12)..(61): Pfam Name: Myb_DNA-binding Pfam Description: Myb-like DNA-binding domain
  misc_feature: Ceres Clone ID no. 1910072
  misc_feature: Bit score of 182.3 for HMM based on sequences of Figure 7
  misc_feature: Functional Homolog Of SEQ ID NO. 323
MASLSMTSSSVRAQWTKKQNKLFEQALAVYDKDTPDRWHNIARAVGGKSAEEVRRYYEMLEEDVKHIESGKVPLPAYRCPGGAGAGALGYEADRMKHLKI

SEQ ID NO: 335 - DNA, 675 bp, Zea mays
  misc_feature: Ceres Clone ID no. 331755
  misc_feature: Encodes the peptide sequence at SEQ ID NO. 336
agaatgcaaaccacaaaacaaagtcaaaccagctgcaacgatcaagagcgaggcttccttgtccagctctccgctcagccgacacacacagattgacagatggcgtctatgtcgctgagctcgtcgagggcgcagtggacggcgaagcagaacaagctgttcgagcaggcgttggcggtgtacgacagggacacgccggaccgctggcacaacatcgcgcgcgccgtgggtggcaagtcggcggacgaggtcaggcgctactacgagctgctggtgaaggacttggagcacatcgaggccggcaaggtggccttccccgcgtacaggtgccccggcggctacgacgacgccgacagcgacaggctgaagcacctgacctgaagatctaggcggcaggcaagcatcatgagaaccactgaacaagtacgtcctacatacgtacacttcgcgccatgtgagtgtagcacgtgtggctacaaaagaagcaagccaagcgagtgggtcggacggattatctgttcaagcacgcatgtgaattagaattactactagcaatagctataggatgttgatcaatcgatctccgttccccccgtgttgcgatgtaaaatctcagcatctgtagcatatatattctgaggagtgaaataaaatacattcactagtttgtggacc

SEQ ID NO: 336 - protein, 93 aa, Zea mays
  misc_feature (10)..(59): Pfam Name: Myb_DNA-binding Pfam Description: Myb-like DNA-binding domain
  misc_feature: Ceres Clone ID no. 331755
  misc_feature: Bit score of 175.6 for HMM based on sequences of Figure 7
  misc_feature: Functional Homolog Of SEQ ID NO. 323
MASMSLSSSRAQWTAKQNKLFEQALAVYDRDTPDRWHNIARAVGGKSADEVRRYYELLVKDLEHIEAGKVAFPAYRCPGGYDDADSDRLKHLT

SEQ ID NO: 337 - protein, 92 aa, Medicago truncatula
  misc_feature (9)..(58): Pfam Name: Myb_DNA-binding Pfam Description: Myb-like DNA-binding domain
  misc_feature: Public GI ID no. 124360540
  misc_feature: Bit score of 178.1 for HMM based on sequences of Figure 7
  misc_feature: Functional Homolog Of SEQ ID NO. 323
MASSSMSASGSWSVKENKAFERALAVYDKDTPDRWYNVAHAVGGKTPEEVKKHYELLVEDIKHIESGKVPFPNYKKISVSHEEKRMRNMSLH

SEQ ID NO: 338 - protein, 102 aa, Vitis vinifera
  misc_feature (13)..(62): Pfam Name: Myb_DNA-binding Pfam Description: Myb-like DNA-binding domain
  misc_feature: Public GI ID no. 157335318
  misc_feature: Bit score of 170.5 for HMM based on sequences of Figure 7
  misc_feature: Functional Homolog Of SEQ ID NO. 323
MASHAFSSSCYSSSSWTQKQNKLFEEALALYDKNTPDRWANIAKAVGGKSAEEVKRHYEILEQDVMHIENGQVPLPIYRSTGSSSGGSVDEQRHLLKNLKLR

SEQ ID NO: 339 - DNA, 279 bp, Populus balsamifera subsp. trichocarpa
  misc_feature: Ceres Annot ID no. 1503394
  misc_feature: Encodes the peptide sequence at SEQ ID NO. 340
atgtcttccagccatcaaactccaaggaattctagctcctcttggacaccaagggaaaacaaactgtttgaaaaggctctagccttgtttgataaggacacaccggaccggtggcaaaatatagccaaagctgttggtggcgtgaaatcagctgaggaaatgaagagacactacgaaatcctcattgaagatcttaaacatatcgagtccggccgtgttcctattcctaattacaagtccagtagaagctacagcaatacaaacgaagaagaaaggtaa

SEQ ID NO: 340 - protein, 92 aa, Populus balsamifera subsp. trichocarpa
  misc_feature (12)..(62): Pfam Name: Myb_DNA-binding Pfam Description: Myb-like DNA-binding domain
  misc_feature: Ceres Annot ID no. 1503394
  misc_feature: Bit score of 163.2 for HMM based on sequences of Figure 7
  misc_feature: Functional Homolog Of SEQ ID NO. 323
MSSSHQTPRNSSSSWTPRENKLFEKALALFDKDTPDRWQNIAKAVGGVKSAEEMKRHYEILIEDLKHIESGRVPIPNYKSSRSYSNTNEEER

SEQ ID NO: 341 - DNA, 315 bp, Populus balsamifera subsp. trichocarpa
  misc_feature: Ceres Annot ID no. 1442707
  misc_feature: Encodes the peptide sequence at SEQ ID NO. 342
atgtcttatttcacatcttcaaatggctccggctcctcttggacagccaaacaaaataagctattcgagaaggccctggctgtatacgacaaagacaccccagaccgctggcaaaatgtggccaaggccgtgggtggcaagtctcctgaagaagttaagaggcactatgatcgtctcgtggaagatctcgtgtacatagaatccggccaagcccctctgccgaattacaagccctctggcagcaatggtaggggacttgttgaagagcaaaggctagctatggtctatccatcatcgatctattcaacttcctaa

SEQ ID NO: 342 - protein, 104 aa, Populus balsamifera subsp. trichocarpa
  misc_feature (11)..(60): Pfam Name: Myb_DNA-binding Pfam Description: Myb-like DNA-binding domain
  misc_feature: Ceres Annot ID no. 1442707
  misc_feature: Bit score of 159.1 for HMM based on sequences of Figure 7
  misc_feature: Functional Homolog Of SEQ ID NO. 323
MSYFTSSNGSGSSWTAKQNKLFEKALAVYDKDTPDRWQNVAKAVGGKSPEEVKRHYDRLVEDLVYIESGQAPLPNYKPSGSNGRGLVEEQRLAMVYPSSIYSTS

SEQ ID NO: 343 - protein, 75 aa, Vitis vinifera
  misc_feature (9)..(58): Pfam Name: Myb_DNA-binding Pfam Description: Myb-like DNA-binding domain
  misc_feature: Public GI ID no. 147784500
  misc_feature: Bit score of 136.5 for HMM based on sequences of Figure 7
  misc_feature: Functional Homolog Of SEQ ID NO. 323
MASTSLKSSGSWTPKQNKLFEKALALYDRDTPDRWQNVANAVGGKSAEEVKQHYEILIRDLKHIESGRVPIPNYK

SEQ ID NO: 344 - DNA, 273 bp, Populus balsamifera subsp. trichocarpa
  misc_feature: Ceres Annot ID no. 1514100
  misc_feature: Encodes the peptide sequence at SEQ ID NO. 345
atggcatcaagctcaatgtcctctcgcggttcgggctcgtggactgttcagcagaacaaagcctttgaaagggctttggctgtgtatgacagagacacgcccgatcgctggtacaatgtagccagggcagtcggtggaaaaaccgcagaagaagtgaaaaggcactatgaactgcttgtggaggatgtgaagcatattgagtcgggccatgttcccttccctaattacaggactaccggggcaaatggccacgcaagagacgggattgtttag

SEQ ID NO: 345 - protein, 90 aa, Populus balsamifera subsp. trichocarpa
  misc_feature (11)..(60): Pfam Name: Myb_DNA-binding Pfam Description: Myb-like DNA-binding domain
  misc_feature: Ceres Annot ID no. 1514100
  misc_feature: Bit score of 165.2 for HMM based on sequences of Figure 7
  misc_feature: Functional Homolog Of SEQ ID NO. 323
MASSSMSSRGSGSWTVQQNKAFERALAVYDRDTPDRWYNVARAVGGKTAEEVKRHYELLVEDVKHIESGHVPFPNYRTTGANGHARDGIV

SEQ ID NO: 346 - DNA, 294 bp, Arabidopsis thaliana
  misc_feature: Ceres Annot ID no. 850366
  misc_feature: Encodes the peptide sequence at SEQ ID NO. 347
atggcatcaagctcaatgtcttctcagagctctggctcgtggactgctaagcagaacaaagcctttgagcaggctctagcaacctatgaccaggacactcctaaccgttggcaaaatgttgccaaagtcgtgggtggaaaaacaacagaggaggtaaagagacactacgaactcttagtgcaagacatcaacagcatagagaacggtcatgttccattcccaaactacaggactagtggaggctgcactaatggcaggcttagtcaggaggaaaaaaggtatgtattgtcctaa

SEQ ID NO: 347 - protein, 97 aa, Arabidopsis thaliana
  misc_feature (11)..(60): Pfam Name: Myb_DNA-binding Pfam Description: Myb-like DNA-binding domain
  misc_feature: Ceres Annot ID no. 850366
  misc_feature: Bit score of 174.5 for HMM based on sequences of Figure 7
  misc_feature: Functional Homolog Of SEQ ID NO. 323
MASSSMSSQSSGSWTAKQNKAFEQALATYDQDTPNRWQNVAKVVGGKTTEEVKRHYELLVQDINSIENGHVPFPNYRTSGGCTNGRLSQEEKRYVLS

SEQ ID NO: 348 - DNA, 303 bp, Arabidopsis thaliana
  misc_feature: Ceres Annot ID no. 543794
  misc_feature: Encodes the peptide sequence at SEQ ID NO. 349
atggcctctagttctatgagctcgagctcttcttggacgtctaagcaaaacaagatgttcgagagggctttagccgtttacgataaagacactcccgaccgttggcaaaacgtggctaaagcagttggaagtaaatctgcagaggaagttaaacgtcactacgacatcctcgttgaagatctcatgaacatcgaacaagacttagtacctttgcctaaatacaaaaccgtcgatgttggaagtaaatctagaggcatcgatgattttgatttgaggttaatgaagaatatgagaatccagtga

SEQ ID NO: 349 - protein, 100 aa, Arabidopsis thaliana
  misc_feature: Ceres Annot ID no. 543794
  misc_feature (9)..(66): Pfam Name: Myb_DNA-binding Pfam Description: Myb-like DNA-binding domain
  misc_feature: Bit score of 158.4 for HMM based on sequences of Figure 7
  misc_feature: Functional Homolog Of SEQ ID NO. 323
MASSSMSSSSSWTSKQNKMFERALAVYDKDTPDRWQNVAKAVGSKSAEEVKRHYDILVEDLMNIEQDLVPLPKYKTVDVGSKSRGIDDFDLRLMKNMRIQ

SEQ ID NO: 350 - DNA, 327 bp, Populus balsamifera subsp. trichocarpa
  misc_feature: Ceres Annot ID no. 1495620
  misc_feature: Encodes the peptide sequence at SEQ ID NO. 351
atgtcttatttcacatcttcaaatggctccggctcctcttggacagccaaacaaaataagctattcgagaaggccctggctgtatacgacaaagacaccccagaccgctggcaaaatgtggccaaggccgtgggtggcaagtctcctgaagaagttaagaggcactatgatcgtctcgtggaagatctcgtgtacatagaatccggccaagcccctctgccgaattacaagccctctggcagcaatggtaggggacttgttgaagagcaaagaccatttaatccaactccaaaaagttttgaatttgtacgatccctgtttgcctag

SEQ ID NO: 351 - protein, 108 aa, Populus balsamifera subsp. trichocarpa
  misc_feature (11)..(60): Pfam Name: Myb_DNA-binding Pfam Description: Myb-like DNA-binding domain
  misc_feature: Ceres Annot ID no. 1495620
  misc_feature: Bit score of 154.5 for HMM based on sequences of Figure 7
  misc_feature: Functional Homolog Of SEQ ID NO. 323
MSYFTSSNGSGSSWTAKQNKLFEKALAVYDKDTPDRWQNVAKAVGGKSPEEVKRHYDRLVEDLVYIESGQAPLPNYKPSGSNGRGLVEEQRPFNPTPKSFEFVRSLFA

SEQ ID NO: 352 - DNA, 469 bp, Glycine max
  misc_feature: Ceres Clone ID no. 1653552
  misc_feature: Encodes the peptide sequence at SEQ ID NO. 353
aacacatcagctcttccttgagtctgatcactacacactactcttcagccttttcatatcaccctttgctaccaaaccaattcagtctctttgcttgttctacctgagtttgaaacgtaaccttagaaccatttcacacaacactttctgttccttaattcctgaaagaaaatggcatcttgttcaatctcagcctcaggctcatggagtgttaaggacaacaaggcctttgaaaaggctctagctgtttatgacaaggacacccctgaccgttggtacaatgttgctcatgctgttggcggcaaaactccagaggaagtgaagaggcactacgaactccttgttcaggatgttaagcatattgagtcaggacgtgttccattcccaaattacaagaaaactacttcagagtcaactgatcaggaggaaaaaaggctgaggaatttgaatttgaacctccagtgacccc

SEQ ID NO: 353 - protein, 97 aa, Glycine max
  misc_feature (9)..(58): Pfam Name: Myb_DNA-binding Pfam Description: Myb-like DNA-binding domain
  misc_feature: Ceres Clone ID no. 1653552
  misc_feature: Bit score of 184.1 for HMM based on sequences of Figure 7
  misc_feature: Functional Homolog Of SEQ ID NO. 323
MASCSISASGSWSVKDNKAFEKALAVYDKDTPDRWYNVAHAVGGKTPEEVKRHYELLVQDVKHIESGRVPFPNYKKTTSESTDQEEKRLRNLNLNLQ

SEQ ID NO: 354 - protein, 96 aa, Vitis vinifera
  misc_feature (7)..(56): Pfam Name: Myb_DNA-binding Pfam Description: Myb-like DNA-binding domain
  misc_feature: Public GI ID no. 147767321
  misc_feature: Bit score of 164.7 for HMM based on sequences of Figure 7
  misc_feature: Functional Homolog Of SEQ ID NO. 323
MSSRSSGSSWTAKQNKAFEEALAVYDKDTPDRWYNVARAVGGKTVEEVKRHYEILVEDIKSIDSDKVPFPNYKTTGASSRSNMSDQEKRMMNLKLR

SEQ ID NO: 355 - DNA, 237 bp, Populus balsamifera subsp. trichocarpa
  misc_feature: Ceres Annot ID no. 1510450
  misc_feature: Encodes the peptide sequence at SEQ ID NO. 356
atgtcttccaattctctcacctcttggacacctaagcaaaacaaactattcgaaaaggccctggctttacatgacaaggacacccctgaccgctggcataatgttgccaaagctgtgggtgggaaatctgcagaggaagtgaagaggcactatgagattctcatcaaggatgtcagggaaattgagtctggcagagttccattccctaattacaggtcaagtggaaacggcaactaa

SEQ ID NO: 356 - protein, 78 aa, Populus balsamifera subsp. trichocarpa
  misc_feature (6)..(55): Pfam Name: Myb_DNA-binding Pfam Description: Myb-like DNA-binding domain
  misc_feature: Ceres Annot ID no. 1510450
  misc_feature: Bit score of 137.5 for HMM based on sequences of Figure 7
  misc_feature: Functional Homolog Of SEQ ID NO. 323
MSSNSLTSWTPKQNKLFEKALALHDKDTPDRWHNVAKAVGGKSAEEVKRHYEILIKDVREIESGRVPFPNYRSSGNGN

SEQ ID NO: 357 - protein, 97 aa, Glycine max
  misc_feature (9)..(58): Pfam Name: Myb_DNA-binding Pfam Description: Myb-like DNA-binding domain
  misc_feature: Public GI ID no. 110931736
  misc_feature: Bit score of 183.1 for HMM based on sequences of Figure 7
  misc_feature: Functional Homolog Of SEQ ID NO. 323
  misc_feature (94)..(94): Xaa is any aa, unknown, or other
MASCSISASGSWSVKDNKAFEKALAVYDKDTPDRWYNVAHAVGGKTPEEVKRHYELLVQDVKHIESGRVPFPNYKKTTSESTDQEEKRLRNLNXNLQ

SEQ ID NO: 358 - DNA, 665 bp, Gossypium hirsutum
  misc_feature: Ceres Clone ID no. 1916884
  misc_feature: Encodes the peptide sequence at SEQ ID NO. 359
acacaccgcaccttgacttgaagtaaccttttgagagaaaaagtccatctattcccttccatcatcgtttcaatttattcaacctttctctcaaattcagtcacaggcatatttattttaagttttagcctgccattcacccgagcttgtcgataaatcctctgttttcaatagttgcatttggattttcatcaaatggcatcccattctctcagttcttcacgtagctctaactcctcctggacacctaagcaaaacaaaatgttcgagaaggctctggctgaatttgaccaggacactcctgagcgctggattaatattgctaaagctgtgggtggaaagtcagctgaggaagtcaagcagcactatgagatcctagtcagggatgtcaaagagatcgagtctggacggtacccttatccatatccaagtgggagcagcaactaaagcagtgagttatcagcttaccgtatccaaagggttctctgaagggtcaaagatcatagtgaaagaacattatattatgcaaccagagacctcaattgcaggaagactattatagaatattccccaggaaaatattattatttgctttatttatctttttgtatttttctttgaccttgtctagttagattaaatgttaaatatattttattgatatt

SEQ ID NO: 359 - protein, 83 aa, Gossypium hirsutum
  misc_feature (13)..(62): Pfam Name: Myb_DNA-binding Pfam Description: Myb-like DNA-binding domain
  misc_feature: Ceres Clone ID no. 1916884
  misc_feature: Bit score of 122.1 for HMM based on sequences of Figure 7
  misc_feature: Functional Homolog Of SEQ ID NO. 323
MASHSLSSSRSSNSSWTPKQNKMFEKALAEFDQDTPERWINIAKAVGGKSAEEVKQHYEILVRDVKEIESGRYPYPYPSGSSN

SEQ ID NO: 360 - DNA, 1123 bp, Gossypium hirsutum
  misc_feature: Ceres Clone ID no. 1847251
  misc_feature: Encodes the peptide sequence at SEQ ID NO. 361
ataccactcccttaacttcaaacaaaatcttcttttaagagtcccttccatcaccttgctttcacattcaggcacctgcatacttcttttaacttttcagccctataattctctcacttaagattttcaccaatggcatctaattctctcacttcctcacgtacctctggctcgtcctggacggcaaagcaaaacaaactgttcgagaaggctctggctaaatatgacaaagacactcctgaccgctggcataacattgccaaggctgtgggtggaaagtcagttgaggaagtcaagctgcactatgagatcctagtcagggatctcaaagacattgagtctggccgctacccttatccatatccaaccaactaaagcgctatgagtttactacttactattcactacctatccacaatcactatagataaccaagaagtgaaggccactttcatatgcatgaatcacattcctaaaaatgcagctgtcatgcttttttgttgatgtagttgtggatttaaagaaaacgtggttcttagaattatcatacatgcgcatatccatgacgtccttgtccttccagctccacacacccacaaccccaaagtccttaagcattgaaaactctcaagtacccaagtgggtccataaaagaaaatccagaaaagtagggaatcttcatgtgcctcccccccccccccccaaatttctttctgtggtctatcactttaaatttttttcctttttccactgagcatatacagttcatttgcatttaatgttcttatagacctaattccttacaattactcaatcctaatctcaaatctttcgactctttttgtctttttggattttggacaacatgccgatggtacttttgtcatttccaacatattttatcttaattatctgcatttgtttttctcacaggagcaaatcaataaattccgtttctagagacttaacttgtcctacttgtctttcaggttagctgaagactatgaatatatatatgcatctagagacctcagttgctgagagactagcctagttccccacctaaagaaatccatacaaaactaattatcccattggtgtaatactaaatgctgttactacc

SEQ ID NO: 361 - protein, 80 aa, Gossypium hirsutum
  misc_feature (13)..(62): Pfam Name: Myb_DNA-binding Pfam Description: Myb-like DNA-binding domain
  misc_feature: Ceres Clone ID no. 1847251
  misc_feature: Bit score of 115.8 for HMM based on sequences of Figure 7
  misc_feature: Functional Homolog Of SEQ ID NO. 323
MASNSLTSSRTSGSSWTAKQNKLFEKALAKYDKDTPDRWHNIAKAVGGKSVEEVKLHYEILVRDLKDIESGRYPYPYPTN

SEQ ID NO: 362 - DNA, 339 bp, Populus balsamifera subsp. trichocarpa
  misc_feature: Ceres Annot ID no. 1457249
  misc_feature: Encodes the peptide sequence at SEQ ID NO. 363
atgtcttccaattctctcacctcttggacacctaagcaaaacaaactattcgaaaaggccctggctttacatgacaaggacacccctgaccgctggcataatgttgccaaagctgtgggtgggaaatctgcagaggaagtgaagaggcactatgagattctcatcaaggatgtcagggaaattgagtctggcagagttccattccctaattacagattaatgtcatatacaagtattaaagcatcatttaagccaggatacaggcaacgtagatttctgatctttcaggacaaattccatgggaatggtcaatcaaattctgcaccgtcattcgcctaa

SEQ ID NO: 363 - protein, 112 aa, Populus balsamifera subsp. trichocarpa
  misc_feature (6)..(55): Pfam Name: Myb_DNA-binding Pfam Description: Myb-like DNA-binding domain
  misc_feature: Ceres Annot ID no. 1457249
  misc_feature: Bit score of 146.4 for HMM based on sequences of Figure 7
  misc_feature: Functional Homolog Of SEQ ID NO. 323
MSSNSLTSWTPKQNKLFEKALALHDKDTPDRWHNVAKAVGGKSAEEVKRHYEILIKDVREIESGRVPFPNYRLMSYTSIKASFKPGYRQRRFLIFQDKFHGNGQSNSAPSFA

SEQ ID NO: 364 - DNA, 518 bp, Glycine max
  misc_feature: Ceres Clone ID no. 1113584
  misc_feature: Encodes the peptide sequence at SEQ ID NO. 365
aatcacacctctttaattagtaacacttaattttcattaccgtcgttttattaagtgtgtgttgctacaacaatggcctcaagtcagggttggactccgaagcagaacaagagatttgagaatgcccttgccatcttcgacaaggacaccccagacaggtggcacacggtggccagggccgtcggaggaaaaacggtggaggaagtgaaaaggcattatgagaagctcgtggaagatgtgaaggagattgaggaaggtcacgtgcccctccccaattaccgaagtgctgcaagaggccacggttacatggatgaagaaaacaggatgaaggttctgagtctgcagtgaagtgtgatttatcaataatatatataatatatgctggatgcttggcttagaactactataaaatattttatttgctttttcgttttttctttccatatatatatatattcaaagcatcgatgccttgtatttctgtttctataaatgtaaagatgaaatgaaattgtccc

SEQ ID NO: 365 - protein, 91 aa, Glycine max
  misc_feature (4)..(53): Pfam Name: Myb_DNA-binding Pfam Description: Myb-like DNA-binding domain
  misc_feature: Ceres Clone ID no. 1113584
  misc_feature: Bit score of 141.8 for HMM based on sequences of Figure 7
  misc_feature: Functional Homolog Of SEQ ID NO. 323
MASSQGWTPKQNKRFENALAIFDKDTPDRWHTVARAVGGKTVEEVKRHYEKLVEDVKEIEEGHVPLPNYRSAARGHGYMDEENRMKVLSLQ

SEQ ID NO: 366 - DNA, 656 bp, Gossypium hirsutum
  misc_feature: Ceres Clone ID no. 1927753
  misc_feature: Encodes the peptide sequence at SEQ ID NO. 367
aagtaattttctttgagagaaataaccccatcttttccctttatacaagtttcaatttattcactctttcaaattcaggaactgacatagttctctaaatttttagcctgtcattctgatccgaagcttgttaaaaagaccctctgttttcagttgtacttattttcacttatgtcatccaattttctcaataattcacgctgctctagctcttcctggacacctaaacaaaacaaaacgttcgagaaggctctggctaaatatgaccaggacactcctgaccgctggcacaatgttgccaaggctgtgggtggaaagtctgctgaggaagtcaagctgcactatgatgccctagtcagggatctcaaagacattgagtctggccgctacccttatccatatccaagtggaagcaacagctaaagtggttcccaaagagtcaagtactaaaatgaaaaagaacatgatactcacaaaaccagagacctcagtcgcacagtcgcagaaatctagcattggatgatattcccccagaaaaaaagaaaatccctactgtaattgtacatgctgctattactattttctgtattatcactttgtattttcctttgaccttgtctagttaaattaaaatattaaatatttatatagtaatt

SEQ ID NO: 367 - protein, 83 aa, Gossypium hirsutum
  misc_feature (13)..(62): Pfam Name: Myb_DNA-binding Pfam Description: Myb-like DNA-binding domain
  misc_feature: Ceres Clone ID no. 1927753
  misc_feature: Bit score of 110.7 for HMM based on sequences of Figure 7
  misc_feature: Functional Homolog Of SEQ ID NO. 323
MSSNFLNNSRCSSSSWTPKQNKTFEKALAKYDQDTPDRWHNVAKAVGGKSAEEVKLHYDALVRDLKDIESGRYPYPYPSGSNS

SEQ ID NO: 368 - DNA, 551 bp, Glycine max
  misc_feature: Ceres Clone ID no. 857342
  misc_feature: Encodes the peptide sequence at SEQ ID NO. 369
aaaatcacagctctttaatttgtaacacttaattttcattgattgagtgtgtgttgctacaacaatggcctcaagccagggttggactccgaagcagaacaagagatttgagaatgcccttgccatcttcgacaaggacaccccagataggtggcacacggtggccagggccgtcggaggaaaaacggtggaggaagtgaaaaggcattatgagaagctcgtggaagatgtgaagaagatagaggaaggtcacgtgcccctccccaattaccgaagtgctgcaagaggctacggttacatggatgaagaaaccaggatgaaggctctgagtctgcagtgaagtgtgatttaccaataaataatatatgttggatgcttggcttagtaccataagatattttattcacttttttgttttttctttccatataatatataggcaaagcatcgttgccttgtgtttctgtttctataaatgtaaagatgaaattgtcccaaagacgggcccactagttaatagtaaaaacagccattgaatatcatattttcac

SEQ ID NO: 369 - protein, 91 aa, Glycine max
  misc_feature (4)..(53): Pfam Name: Myb_DNA-binding Pfam Description: Myb-like DNA-binding domain
  misc_feature: Ceres Clone ID no. 857342
  misc_feature: Bit score of 139.8 for HMM based on sequences of Figure 7
  misc_feature: Functional Homolog Of SEQ ID NO. 323
MASSQGWTPKQNKRFENALAIFDKDTPDRWHTVARAVGGKTVEEVKRHYEKLVEDVKKIEEGHVPLPNYRSAARGYGYMDEETRMKALSLQ

SEQ ID NO: 370 - DNA, 489 bp, Gossypium hirsutum
  misc_feature: Ceres Clone ID no. 100068619
  misc_feature: Encodes the peptide sequence at SEQ ID NO. 371
ctctttttcttttcttctcttttctttggcctcagacccttaatttcgattgttaattatcactgttctgcaatggcgtcaggttcgaactggacgccaaagcaaaacaagttgttcgagaacgctttagctatctacgacaaggatacaccagaccggtggcacaagctagccagggctgtcggggggaagaccgtggaggaagtgaagttgcattaccagaaccttgtggatgacatcaagcagatagagtctgggcacgtgcctttgcccccttataagaaagctggagggaaccaaggatacaacaatttcatggacgatgaagaaccaaggatgaggaatctcaggctttagtgaagtatgaaccagaaatagctgtagaatatcaacctttcaataaaaggaaatgcaaagcagcaaacatataaattatctcttaatttcgtttacatttcctgctcatatatatgttttttgtgtgcttga

SEQ ID NO: 371 - protein, 94 aa, Gossypium hirsutum
  misc_feature (4)..(53): Pfam Name: Myb_DNA-binding Pfam Description: Myb-like DNA-binding domain
  misc_feature: Ceres Clone ID no. 100068619
  misc_feature: Bit score of 130.0 for HMM based on sequences of Figure 7
  misc_feature: Functional Homolog Of SEQ ID NO. 323
MASGSNWTPKQNKLFENALAIYDKDTPDRWHKLARAVGGKTVEEVKLHYQNLVDDIKQIESGHVPLPPYKKAGGNQGYNNFMDDEEPRMRNLRL

SEQ ID NO: 372 - protein, 97 aa, Arabidopsis thaliana
  misc_feature (9)..(54): Pfam Name: Myb_DNA-binding Pfam Description: Myb-like DNA-binding domain
  misc_feature: Public GI ID no. 145327247
  misc_feature: Bit score of 153.0 for HMM based on sequences of Figure 7
  misc_feature: Functional Homolog Of SEQ ID NO. 323
MASNSRSSISPWTFSQNKMFERALAVYDKDTPDRWHNVAKAVGGKTVEEVKRHYDILVEDLINIETGRVPLPNYKTFESNSRSINDFDTRKMKNLKI

SEQ ID NO: 373 - DNA, 276 bp, Solanum lycopersicum
  misc_feature: Ceres Annot ID no. 8461532
  misc_feature: Encodes the peptide sequence at SEQ ID NO. 374
atggcctcgtggactgcaaggcaaaacaagaagttcgaagaggctttggcgttatatgacagagacacacctgatcgttggcataacattgcaaggtgtgtaggtggaaaatcagctgcagaagtgaagaggcattatgaagtacttgtgaaggatatcatgcaaatagaaaatggtcaagtacctttaccaaattacaaagccgcggctgaaaccaataacagatcaggttatgccaatgaacataggcttctgaagaacctgaagttacagtga

SEQ ID NO: 374 - protein, 91 aa, Solanum lycopersicum
  misc_feature (1)..(50): Pfam Name: Myb_DNA-binding Pfam Description: Myb-like DNA-binding domain
  misc_feature: Ceres Annot ID no. 8461532
  misc_feature: Bit score of 135.9 for HMM based on sequences of Figure 7
  misc_feature: Functional Homolog Of SEQ ID NO. 323
MASWTARQNKKFEEALALYDRDTPDRWHNIARCVGGKSAAEVKRHYEVLVKDIMQIENGQVPLPNYKAAAETNNRSGYANEHRLLKNLKLQ

SEQ ID NO: 375 - DNA, 776 bp, Panicum virgatum
  misc_feature: Ceres Clone ID no. 1722230
  misc_feature: Encodes the peptide sequence at SEQ ID NO. 376
atcagctcatcacaactcttgatctctagctagctaaagagataagcttcctctcttcctctcggtcgaaggagtgatcctctctcactctcaccaggagctcagctcgggtagctcaaggaggccagaagaagaaatggcgtcgctgtcgatgaccagcagctcggtgcgggcgcagtggacgaagaagcagaacaagctcttcgagcaggcgttggccgtgtacgacaaggacacccccgaccggtggcacaacatcgcccgcgccgtcggcggcaagtccgccgaggaggtcaggcgctactacgagctgctggaggaggatgtcaagcacatcgagtccggcaaggtgcccttccccgcctaccgctgccccggcggcgccggcgccggcgccctcggctacgaggccgacaggatgaagcatctgaagatctaggcgaacttcagagtatggtcgagaagaggctgcgcaggcacgtgtattagtgtatatatgattgggacagcatgcatgtccatgctactcctacgcaagtggtctggaagaagcaagaagaatcagatgagatgcatgcatgtcataattaattaattaattaattaattaataattagtatgggatgatcgagtagtatcctagcctgtcacgcgagatcgaccgacccatcgatctcccagcatgtgtccttcgtacccacgcgcgtatgtgtattatatcctagctgcatctgtgtaccataccaatcaagaaacatgaacttgatattgatgc

SEQ ID NO: 376 - protein, 100 aa, Panicum virgatum
  misc_feature (12)..(61): Pfam Name: Myb_DNA-binding Pfam Description: Myb-like DNA-binding domain
  misc_feature: Ceres Clone ID no. 1722230
  misc_feature: Bit score of 183.0 for HMM based on sequences of Figure 7
  misc_feature: Functional Homolog Of SEQ ID NO. 323
MASLSMTSSSVRAQWTKKQNKLFEQALAVYDKDTPDRWHNIARAVGGKSAEEVRRYYELLEEDVKHIESGKVPFPAYRCPGGAGAGALGYEADRMKHLKI

SEQ ID NO: 377 - DNA, 574 bp, Gossypium hirsutum
  misc_feature: Ceres Clone ID no. 1897493
  misc_feature: Encodes the peptide sequence at SEQ ID NO. 378
cttctacacctctttttcttttctttttttggcctcagaccctgaatttcgattgttaattatcactgttctgcaatggcgtcaggttcgaactggacgccaaagcaaaacaagttgttcgagaacgctttagctatctacgacaaggatacaccagaccggtggcacaagctagccagggctgttggggggaagaccgtggaggaagtgaagttgcattaccagaaccttttggatgacatcaagcagatagagtctgggcacgtgcctttgcccccttacaagaaagctggaggaacaaaggatacaacaatttcatggacgatgaagaaccaaggatgaggaatctcaggctttagtgaagtatgaaccagaaatagcctgtagaatatcaacctttcaataaaaggaaatgcaaagcagcaaacatataaattattgctcttaatttcgtttacatttcccgctcatatatatatatatgttttttgtgtgcttgaatgtaacaagcagccacaacgttcctatacttgcatgtatcaagtatgaaattatagcattggtgccttgtttt

SEQ ID NO: 378 - protein, 88 aa, Gossypium hirsutum
  misc_feature (4)..(53): Pfam Name: Myb_DNA-binding Pfam Description: Myb-like DNA-binding domain
  misc_feature: Ceres Clone ID no. 1897493
  misc_feature: Bit score of 124.3 for HMM based on sequences of Figure 7
  misc_feature: Functional Homolog Of SEQ ID NO. 323
MASGSNWTPKQNKLFENALAIYDKDTPDRWHKLARAVGGKTVEEVKLHYQNLLDDIKQIESGHVPLPPYKKAGGTKDTTISWTMKNQG

SEQ ID NO: 379 - DNA, 381 bp, Arabidopsis thaliana
  misc_feature: Ceres Annot ID no. 838426
  misc_feature: Encodes the peptide sequence at SEQ ID NO. 380
atggcgtcaaactcaagaagttcaatctcaccatggacgtttagtcaaaacaagatgttcgagagggccttggcagtttacgacaaggacacacccgaccgatggcacaatgtggcaaaagctgtcggagggaaaactgtagaagaagtgaagcgccactatgacattctcgtcgaggatctcatcaacatcgagactggtcgtgtccctttgcccaattacaagaccttcgaatctaactcaagaagcatcaatgactttgacacaaggtatataactaaatatctatatatgatgctctcgatatattttgataatcattctagtgattttgagaaattctctcaaaaagttcttgtaagttatatttctttggtttaa

SEQ ID NO: 380 - protein, 126 aa, Arabidopsis thaliana
  misc_feature (9)..(54): Pfam Name: Myb_DNA-binding Pfam Description: Myb-like DNA-binding domain
  misc_feature: Ceres Annot ID no. 838426
  misc_feature: Bit score of 147.8 for HMM based on sequences of Figure 7
  misc_feature: Functional Homolog Of SEQ ID NO. 323
MASNSRSSISPWTFSQNKMFERALAVYDKDTPDRWHNVAKAVGGKTVEEVKRHYDILVEDLINIETGRVPLPNYKTFESNSRSINDFDTRYITKYLYMMLSIYFDNHSSDFEKFSQKVLVSYISLV

SEQ ID NO: 381 - DNA, 306 bp, Arabidopsis thaliana
  misc_feature: Ceres Annot ID no. 827713
  misc_feature: Encodes the peptide sequence at SEQ ID NO. 382
atggcatcaggctcaatgtcttcttatggctctggctcatggactgttaagcagaacaaagcctttgagcgtgctctagcagtctatgaccaagacactccggaccgttggcacaatgttgctagagctgttggtggtaaaacaccagaagaagctaagagacagtatgaccttctagttcgtgacatcgaaagcatcgagaatggtcacgtgccattccctgactacaagactactacaggaaacagcaacagaggcaggctgcgtgatgaggaaaagaggatgagaagcatgaagctgcagtga

SEQ ID NO: 382 - protein, 101 aa, Arabidopsis thaliana
  misc_feature (11)..(60): Pfam Name: Myb_DNA-binding Pfam Description: Myb-like DNA-binding domain
  misc_feature: Ceres Annot ID no. 827713
  misc_feature: Bit score of 171.4 for HMM based on sequences of Figure 7
  misc_feature: Functional Homolog Of SEQ ID NO. 323
MASGSMSSYGSGSWTVKQNKAFERALAVYDQDTPDRWHNVARAVGGKTPEEAKRQYDLLVRDIESIENGHVPFPDYKTTTGNSNRGRLRDEEKRMRSMKLQ

SEQ ID NO: 383 - DNA, 776 bp, Panicum virgatum
  misc_feature: Ceres Clone ID no. 1763593
  misc_feature: Encodes the peptide sequence at SEQ ID NO. 384
atcagctcatcacagctctcttgatctctagctagagataagcaagcttcctcttcctctcggtcgagcgagcgagtgatcctctctcactcccaccaggagctcgggtaactcaaggaggccagaagaagaaatggcgtcgctgtcgatgaccagtagctcggtgcgggcgcagtggacgaagaagcagaacaagctgttcgagcaggctctggccgtgtacgacaaggacacgcccgaccggtggcacaacatcgcccgcgccgtcggcggcaagtccgccgaggaggtcaggcgctactacgagctgctggaggaggacgtcaagcacatcgagtccggcaaggtgcccttccccgcctaccgctgccccggcggcgccggcgccggcgccggcgccctcggctacgaggccgacaggatgaagcatctgaagatctaggcgaacttcagaggatgatgatggtcgagaagaggctgctcagtgctcacgcacgtgtatatatgattgggacagcatgcatgtccatgctactcttagcaagtggtctggagaagcaagaagaatcagatgagatgcatgcatgttacaatcaattaataatttgtatggggtgatcgagtagtatcctagcctgtcacgcacgcgagatcgaccgacccatcgatctcccagcatgtgtccttcgtacccacgcgtatctgtattatatcctagctgcatctgtgtaccataccaatcaagaaacatgaacttgatattgatgcatttctac

SEQ ID NO: 384 - protein, 102 aa, Panicum virgatum
  misc_feature (12)..(61): Pfam Name: Myb_DNA-binding Pfam Description: Myb-like DNA-binding domain
  misc_feature: Ceres Clone ID no. 1763593
  misc_feature: Bit score of 181.2 for HMM based on sequences of Figure 7
  misc_feature: Functional Homolog Of SEQ ID NO. 323
MASLSMTSSSVRAQWTKKQNKLFEQALAVYDKDTPDRWHNIARAVGGKSAEEVRRYYELLEEDVKHIESGKVPFPAYRCPGGAGAGAGALGYEADRMKHLKI

SEQ ID NO: 385 - DNA, 508 bp, Arabidopsis thaliana
  misc_feature: Ceres Clone ID no. 143475
  misc_feature: Encodes the peptide sequence at SEQ ID NO. 386
aaaatcaagtcctttttcatcaagtcatacatacatcttccttcttctttttttctccctcccaagaagcagatcttgtactctcgatatacaaacttattcgtgatatggcttccaactcaatgagctctagcgcttcttggacacgtaaggagaacaaattatttgaaagggcgttggctacatatgaccaggacactcctgaccgttggcataacgttgcaagagccgttggcggcaaatcagctgaagaagtaaggcgacactacgagctcctcattagggatgtcaatgacattgagtcagggcgttatccacatcccaattaccgttcaaatggaaacaatcactgaaagcattgaaggaactccaaaaggctctactgaagtggacatggttccaaaaccattcacaaagcacatctaagcaaagatatctaaatgtatttacttgtttttgtgttacgaatatgtaagaattatctaaatcaatcaatgtggtttcatat

SEQ ID NO: 386 - protein, 81 aa, Arabidopsis thaliana
  misc_feature (9)..(58): Pfam Name: Myb_DNA-binding Pfam Description: Myb-like DNA-binding domain
  misc_feature: Ceres Clone ID no. 143475
  misc_feature: Bit score of 140.1 for HMM based on sequences of Figure 7
  misc_feature: Functional Homolog Of SEQ ID NO. 323
MASNSMSSSASWTRKENKLFERALATYDQDTPDRWHNVARAVGGKSAEEVRRHYELLIRDVNDIESGRYPHPNYRSNGNNH

SEQ ID NO: 387 - DNA, 237 bp, Solanum lycopersicum
  misc_feature: Ceres Annot ID no. 8456508
  misc_feature: Encodes the peptide sequence at SEQ ID NO. 388
atggcatcaaattcactcactgcttggactccaagagaaaacaagaaattcgagcaggcactcgcggtctacgataaggacacatctgatcgatggcaaaacattgctagatacgttggtgggaaatcagttgaagaagttaaacatcactatgctatacttgtagaggatcttaagcacattgaatctggtgacgtcccattcccaaaatacaagtcaggtggaaagtctcgttaa

SEQ ID NO: 388 - protein, 78 aa, Solanum lycopersicum
  misc_feature (6)..(55): Pfam Name: Myb_DNA-binding Pfam Description: Myb-like DNA-binding domain
  misc_feature: Ceres Annot ID no. 8456508
  misc_feature: Bit score of 124.5 for HMM based on sequences of Figure 7
  misc_feature: Functional Homolog Of SEQ ID NO. 323
MASNSLTAWTPRENKKFEQALAVYDKDTSDRWQNIARYVGGKSVEEVKHHYAILVEDLKHIESGDVPFPKYKSGGKSR

SEQ ID NO: 389 - DNA, 505 bp, Gossypium hirsutum
  misc_feature: Ceres Clone ID no. 100002959
  misc_feature: Encodes the peptide sequence at SEQ ID NO. 390
  misc_feature (24)..(24): n is a, c, t, g, unknown, or other
cattccaaattttgattattttcnttcttttttattttttttatttaaaatttgaaactgctaacattattacattttcattagcctcaagagaagaaaaaaaaatgtcatcgaattcaatgtctgcttcatggacagccaagcaaaacaaagatttcgaaagggctttagctgtttacgacaaggacacaccagatcgttggtacaatgttgctaaagctgtgggagggaaaactgttgaggaagtgaagaagcactatgagcttcttctggaagatgttagacacatcgagtcgggtcgggttcctttccccgactattggaccgttaccgggaatcgtcaagcatgaaagattccgaagctcaaatgaagaagaaaaaatggtggacttgcatggatctcacccttatatgtgtgtgtgtgtgtgtggcagtaattgtagtacttaagaatagccataaatgtatttaggaagaggaagaagagcttaatgggtgatcattg

SEQ ID NO: 390 - protein, 81 aa, Gossypium hirsutum
  misc_feature (7)..(56): Pfam Name: Myb_DNA-binding Pfam Description: Myb-like DNA-binding domain
  misc_feature: Ceres Clone ID no. 100002959
  misc_feature: Bit score of 141.4 for HMM based on sequences of Figure 7
  misc_feature: Functional Homolog Of SEQ ID NO. 323
MSSNSMSASWTAKQNKDFERALAVYDKDTPDRWYNVAKAVGGKTVEEVKKHYELLLEDVRHIESGRVPFPDYWTVTGNRQA

SEQ ID NO: 391 - protein, 93 aa, Antirrhinum majus
  misc_feature (8)..(57): Pfam Name: Myb_DNA-binding Pfam Description: Myb-like DNA-binding domain
  misc_feature: Public GI ID no. 118137433
  misc_feature: Bit score of 157.9 for HMM based on sequences of Figure 7
  misc_feature: Functional Homolog Of SEQ ID NO. 323
MASTRGSGRPWSAKENKAFERALAVYDKDTPDRWANVARAVEGRTPEEVKKHYEILVEDIKYIESGKVPFPNYRTTGGNMKTDEKRFRNLKIR

SEQ ID NO: 392 - DNA, 747 bp, Zea mays
  misc_feature: Ceres Clone ID no. 1523182
  misc_feature: Encodes the peptide sequence at SEQ ID NO. 393
gctcagcatacacaacatcatcatcatcatcttctcgctagtcgagcgagcccttatagttaattaagctagtcgatcgatccaagagaagaagaagcagcagacaggaatggcgtcgctctcgatgacgacgagcgcagcggcccgcgcgcagtggacgcctaggcagaacaagctgttcgagcaggcgctggcggtgtacgacaaggacacgcccgaccgctggcacaacatcgcctgcgccgtcggcggcgggaagtccgcggacgacgtcaggcgctactacgagctgctggaggaggacgtcggccacatcgagtccggcaaggtgcccttccccgcctaccgctaccccgccggctacggggccgccgacaggctgaaacagctgaagatctaggaggtcaattgaacatataggacgaacgatcgatgatccagaagatgcaaacatgtgtgtatataggattaatgggacagtatcagtatgcatgcaatggtccatgctgcaagtgcatgcaagtggtgtgtgaaagcaagaatcagattagatgcatgcatatgcatgtgttaatttagtagtaataattgtagtatgggatgagtcctatactagccagtcacgcgcgatcgaccgaccgacccatcgatctccaatgcttctgttccctctccctcctacttgtccacttgtgtgtatatataaatattatgtatttttattattatatatactctacctgttct

SEQ ID NO: 393 - protein, 96 aa, Zea mays
  misc_feature (13)..(63): Pfam Name: Myb_DNA-binding Pfam Description: Myb-like DNA-binding domain
  misc_feature: Ceres Clone ID no. 1523182
  misc_feature: Bit score of 154.2 for HMM based on sequences of Figure 7
  misc_feature: Functional Homolog Of SEQ ID NO. 323
MASLSMTTSAAARAQWTPRQNKLFEQALAVYDKDTPDRWHNIACAVGGGKSADDVRRYYELLEEDVGHIESGKVPFPAYRYPAGYGAADRLKQLKI

SEQ ID NO: 394 - DNA, 752 bp, Panicum virgatum
  misc_feature: Ceres Clone ID no. 1761808
  misc_feature: Encodes the peptide sequence at SEQ ID NO. 395
atcagctcatcacagctcttgatctctagctagctagagagataagcttcctctcttcctctcggtcgagggagtgatcctctctcactctcaccaggagctcagctcgggtagctcaaggaggccagaagaagaaatggcgtcgctgtcgatgaccagcagctcggtgcgggcgcagaggacgaagaagcagaacaagctcttcgagcaggcgttggccgtgtacgacaaggacacccccgaccggtggcacaacatcgcccgcgccgtcggcggcaagtccgccgaggaggtcaggcgctactacgagctgctggaggaggatgtcaagcacatcgagtccggcaaggtgcccctccccgcctaccgctgccccggcggcgccggcgccggcgccctcggctacgaggccgacaggatgaagcatctgaagatctaggcgaacttcaaaggatggtcgagaagaggctgcgcaggcacgtgtatatatgattgggatagcatgcatgtccatgctactcctacgcaagtggtctggaagaagcaagaagaatcagatgagatgcatgcatgtcataattaattaataattagtatgggatgatcgagtagtatcctagcctgtcacgcgagatcgaccgacccatcgatctcccagcatgtgtccttcgtacccacgcgcgtatgtgtattatatcctagctgcatctgtgtaccataccaatcaagaaacatgaacttgatattgatgc

SEQ ID NO: 395 - protein, 100 aa, Panicum virgatum
  misc_feature (9)..(58): Pfam Name: Myb_DNA-binding Pfam Description: Myb-like DNA-binding domain
  misc_feature: Ceres Clone ID no. 1761808
  misc_feature: Bit score of 174.9 for HMM based on sequences of Figure 7
  misc_feature: Functional Homolog Of SEQ ID NO. 323
MASLSMTSSSVRAQRTKKQNKLFEQALAVYDKDTPDRWHNIARAVGGKSAEEVRRYYELLEEDVKHIESGKVPLPAYRCPGGAGAGALGYEADRMKHLKI

SEQ ID NO: 396 - DNA, 517 bp, Brassica napus
  misc_feature: Ceres Clone ID no. 1069222
  misc_feature: Encodes the peptide sequence at SEQ ID NO. 397
aaaatcaactcatacatacatctttcttcttttactccctccaaagaaaccagatttccattttcaaaacactcttttcgatcttttactaaatggcttccaactccatgagttctaacacttcttggacgcgtaaggagaacaaactatttgaaagggctttggctatatatgagcaggacactcctgaccgatggcataacgttgctagagcagttggtgggaaatcggctgaagaagtaaggagacactacgagctcctcgtaagggatgtcaatgacattgagtcagggcgttatccgcatcctacttaccgttcaaatggaaactgaaagcatttaagctactcaaaaaggttcctctgaaaccaacatgattcgaaaaccagaaacaaacagagaggatctaaacaaagatatatcaaatgtatttacgtctattgtgttatatgtatacgactatgtaagaattttatgctttcatgctaatattaatgaatcaacgtgagtttcacatg

SEQ ID NO: 397 - protein, 79 aa, Brassica napus
  misc_feature (9)..(58): Pfam Name: Myb_DNA-binding Pfam Description: Myb-like DNA-binding domain
  misc_feature: Ceres Clone ID no. 1069222
  misc_feature: Bit score of 129.8 for HMM based on sequences of Figure 7
  misc_feature: Functional Homolog Of SEQ ID NO. 323
MASNSMSSNTSWTRKENKLFERALAIYEQDTPDRWHNVARAVGGKSAEEVRRHYELLVRDVNDIESGRYPHPTYRSNGN

SEQ ID NO: 398 - DNA, 267 bp, Sorghum bicolor
  misc_feature: Ceres Annot ID no. 8734209
  misc_feature: Encodes the peptide sequence at SEQ ID NO. 399
atggcgtcgatgcagtcgatgacgagcgcagcggcgcgcgcgcagtggacgccgaagcagaacaagctgttcgagcaggcgctggccgtttacgacaaggacacgccggaccggtggcacaacatcgcccgcgccgtcggcggcggcaagtccgccgaggacgtcaggcgctactacgacctgctggaggaggacgtcggccacatcgagtccggcaaggtgcccttcccggcctaccgctgcgccaccggctacggggccgcctga

SEQ ID NO: 399 - protein, 88 aa, Sorghum bicolor
  misc_feature (13)..(63): Pfam Name: Myb_DNA-binding Pfam Description: Myb-like DNA-binding domain
  misc_feature: Ceres Annot ID no. 8734209
  misc_feature: Bit score of 144.2 for HMM based on sequences of Figure 7
  misc_feature: Functional Homolog Of SEQ ID NO. 323
MASMQSMTSAAARAQWTPKQNKLFEQALAVYDKDTPDRWHNIARAVGGGKSAEDVRRYYDLLEEDVGHIESGKVPFPAYRCATGYGAA

SEQ ID NO: 400 - DNA, 282 bp, Solanum lycopersicum
  misc_feature: Ceres Annot ID no. 8461540
  misc_feature: Encodes the peptide sequence at SEQ ID NO. 401
atggccacaaattcaacgtggagtcatcatcaaaacaagttatttgagaatgcattggccatttacgacatcgatacaccagatcgatggcgtaaattagccaatgcagttggtggaaaaacagaagaagaagtgaaaaatcactatgaaaaacttgttgaagatattaagcgtatcgaatctggaaatattccattacctaattataatggtggtcgtaataataaaggctacaatttcatggatgaagaacaaaggctgaagtatttgaagctccaatga

SEQ ID NO: 401 - protein, 93 aa, Solanum lycopersicum
  misc_feature (4)..(53): Pfam Name: Myb_DNA-binding Pfam Description: Myb-like DNA-binding domain
  misc_feature: Ceres Annot ID no. 8461540
  misc_feature: Bit score of 121.3 for HMM based on sequences of Figure 7
  misc_feature: Functional Homolog Of SEQ ID NO. 323
MATNSTWSHHQNKLFENALAIYDIDTPDRWRKLANAVGGKTEEEVKNHYEKLVEDIKRIESGNIPLPNYNGGRNNKGYNFMDEEQRLKYLKLQ

SEQ ID NO: 402 - DNA, 408 bp, Brassica napus
  misc_feature: Ceres Clone ID no. 1086604
  misc_feature: Encodes the peptide sequence at SEQ ID NO. 403
gcaaatcaacattttcatcgttaatacaaaccaacttctctaacgtcgctcttttgttattctacattttcacactaatggcttccaactcaattatcagcacttcccggagctctacctcgtcatggacagcgaaacaggacaaacagttcgaaatggctttggctaagttcgagaaggacactcctgaccgatggcaaaatgtggcaagagtagttggtggaaaatcagctgaagaggtaaaaagacgctatgaattgctcgttagagatgttaatgacattgaatcaggacgttacgacccacaacctaggtaccgtaacactaattgaagccattgagattctttgtgagctccggaaaaaataactatgtgcctttaaactctattgagatggagacattaag

SEQ ID NO: 403 - protein, 84 aa, Brassica napus
  misc_feature (14)..(63): Pfam Name: Myb_DNA-binding Pfam Description: Myb-like DNA-binding domain
  misc_feature: Ceres Clone ID no. 1086604
  misc_feature: Bit score of 105.3 for HMM based on sequences of Figure 7
  misc_feature: Functional Homolog Of SEQ ID NO. 323
MASNSIISTSRSSTSSWTAKQDKQFEMALAKFEKDTPDRWQNVARVVGGKSAEEVKRRYELLVRDVNDIESGRYDPQPRYRNTN

SEQ ID NO: 404 - DNA, 481 bp, Arabidopsis thaliana
  misc_feature: Ceres Clone ID no. 41695
  misc_feature: Encodes the peptide sequence at SEQ ID NO. 405
aattcaagtcatctctatccgtcaacaatacaaaccaaccttctcaattcctctcttttcatccacattttcactagctaatggcttctagttcaatgagcacctcatcatggacagctagagaggacaagcaattcgaaatggcgttggcgaaattcgacaaggacactcctgaccgttggcaaaaaattgcaagggcagttggtgggaaatcaactgaagaagtaaagcgacactatgaattgctccttagggatgtgaatgacattgagtcaggacgctatccacaacctaggtaccgtaacactaattgaagccattaataaaatgcctttctatcaagaagaggacatttgagagaatctataaagaactaagaatttcgatgtatttcttatattctatttgctttctttttttgttttttttttaatttctgtttggttttcagatatataataatctctctcaatatccatcc

SEQ ID NO: 405 - protein, 77 aa, Arabidopsis thaliana
  misc_feature (8)..(57): Pfam Name: Myb_DNA-binding Pfam Description: Myb-like DNA-binding domain
  misc_feature: Ceres Clone ID no. 41695
  misc_feature: Bit score of 112.6 for HMM based on sequences of Figure 7
  misc_feature: Functional Homolog Of SEQ ID NO. 323
MASSSMSTSSWTAREDKQFEMALAKFDKDTPDRWQKIARAVGGKSTEEVKRHYELLLRDVNDIESGRYPQPRYRNTN

SEQ ID NO: 406 - protein, 83 aa, Antirrhinum majus
  misc_feature (13)..(62): Pfam Name: Myb_DNA-binding Pfam Description: Myb-like DNA-binding domain
  misc_feature: Public GI ID no. 112292440
  misc_feature: Bit score of 109.3 for HMM based on sequences of Figure 7
  misc_feature: Functional Homolog Of SEQ ID NO. 323
MASSSMTSSRGSSSLWTPKQNRQFEEALTMFDKDTPDRWQNIARRIDGKSAEQVRRYYEELLKDITRIENDQVPIPNYKTNNR

SEQ ID NO: 407 - protein, 78 aa, Arabidopsis thaliana
  misc_feature (8)..(57): Pfam Name: Myb_DNA-binding Pfam Description: Myb-like DNA-binding domain
  misc_feature: Public GI ID no. 116830269
  misc_feature: Bit score of 117.6 for HMM based on sequences of Figure 7
  misc_feature: Functional Homolog Of SEQ ID NO. 323
MASSSMSTSSWTAREDKQFEMALAKFDKDTPDRWQKIARAVGGKSTEEVKRHYELLLRDVNDIESGRYPQPRYRNTNG

SEQ ID NO: 408 - DNA, 663 bp, Panicum virgatum
  misc_feature: Ceres Clone ID no. 1775942
  misc_feature: Encodes the peptide sequence at SEQ ID NO. 409
acaagccacacaggccaagcgagcgatcaagagccagccatcagctctcgcgcgctcagtttagctagctgcttcttctgagagaaattaaagatacatatagctagtaggagatagatggcgtcgatgtcaatgagatcgtcgagggcgcagtggacgaagaagcaggacaagctgttcgagcaggcgctggcggtgtacgacaaggacacgccggaccggtggcacaacatcgcgcgcgccgtggggggcaagtcggcggaggaggtcaggcgctactacgagctgctggaagaggacgtcaagcgcatcgaggccggcaaggtgcccttccccgtctataggtgcccgccggcgccgcccccaattactagctaggcccacaggctgaagcaccagaagatctacgtacgtacttcggcaacaatcatgacatacagtgggtttggctacaaaacagtaactcaaccaagtggccggagcatccgtgcacatatatgaataactaccgctacctctagttaccgcagatcaatcgatctcccatgtatgtagtagtatacgtgttcatctggattctcaatttctcatgtaagatcatctctgtatttgtattatgtatcttgagaaaaagtgaagtaaaaaagtccttcatttcccctt

SEQ ID NO: 409 - protein, 86 aa, Panicum virgatum
  misc_feature (10)..(59): Pfam Name: Myb_DNA-binding Pfam Description: Myb-like DNA-binding domain
  misc_feature: Ceres Clone ID no. 1775942
  misc_feature: Bit score of 143.9 for HMM based on sequences of Figure 7
  misc_feature: Functional Homolog Of SEQ ID NO. 323
MASMSMRSSRAQWTKKQDKLFEQALAVYDKDTPDRWHNIARAVGGKSAEEVRRYYELLEEDVKRIEAGKVPFPVYRCPPAPPPITS

SEQ ID NO: 410 - DNA, 563 bp, Musa acuminata
  misc_feature: Ceres Clone ID no. 1723374
  misc_feature: Encodes the peptide sequence at SEQ ID NO. 411
acacagatcagctagctccaccagagaagcaaagcaaacccttcttccctgagatggcatccggttcgatgagctcctcctggaccgcgaaggagaacaagatgttcgagaaggcactggcggtgtacgacagggacacccccgaccgctggcacaagatcgcccgggccatcggcgggaagacggcggacgaagtgaagcgctactacgacctgctcgtggaggacgtgcgccgcatcgaggctggccaaatgccgtacgccaattaccggtcctctaatggcagaggttgagagtgtttggagctcaaccggagaacgaacaagaagcaaggagcatttcactgttctggatatcagttaccacaatcttaattataggactatatgaactctacatgtctgtggacttacaagtagtttcttctatgcagtcttctttctcccttctatcgtgtactcccagatatatcgaagactgccatcataaacatatatatggctagtcttcttgtaatcggttatcttgcttgctaatgaacgcttagtattgttctattctag

SEQ ID NO: 411 - protein, 79 aa, Musa acuminata
  misc_feature (7)..(56): Pfam Name: Myb_DNA-binding Pfam Description: Myb-like DNA-binding domain
  misc_feature: Ceres Clone ID no. 1723374
  misc_feature: Bit score of 122.5 for HMM based on sequences of Figure 7
  misc_feature: Functional Homolog Of SEQ ID NO. 323
MASGSMSSSWTAKENKMFEKALAVYDRDTPDRWHKIARAIGGKTADEVKRYYDLLVEDVRRIEAGQMPYANYRSSNGRG

SEQ ID NO: 412 - DNA, 285 bp, Populus balsamifera subsp. trichocarpa
  misc_feature: Ceres Annot ID no. 1457230
  misc_feature: Encodes the peptide sequence at SEQ ID NO. 413
atggcatcaagttctttcccgcagcccagcacaaattggtcagccgaacaaaacaagttgttcgaaaatgctcttgcgatatatgataaggacactccggatcgttgggggaaaatagccaagattgtcaaaggaacaaccgaggatgaagtaaagcagcaatacgagatccttcttgatgatataaagagcattgagtcggacaaagtcccgctaccgaattacaagaacgaaggaagcagcaaggaaaacatcatcggtaatgaagaggagaggctgcagtaa

SEQ ID NO: 413 - protein, 94 aa, Populus balsamifera subsp. trichocarpa
  misc_feature (10)..(59): Pfam Name: Myb_DNA-binding Pfam Description: Myb-like DNA-binding domain
  misc_feature: Ceres Annot ID no. 1457230
  misc_feature: Bit score of 124.4 for HMM based on sequences of Figure 7
  misc_feature: Functional Homolog Of SEQ ID NO. 323
MASSSFPQPSTNWSAEQNKLFENALAIYDKDTPDRWGKIAKIVKGTTEDEVKQQYEILLDDIKSIESDKVPLPNYKNEGSSKENIIGNEEERLQ

SEQ ID NO: 414 - DNA, 270 bp, Sorghum bicolor
  misc_feature: Ceres Annot ID no. 8667653
  misc_feature: Encodes the peptide sequence at SEQ ID NO. 415
atgtcgctgagctcgacgagggcgcagtggacggcgaagcagaacaagctgttcgagcaggcgctggcggtgtacgacagggacacgccggaccggtggcacaacatcgcgcgcgccgtcgggggcggcaagtcggcggacgaggtcaggcgctactacgagctgctggtgaaggacgtggagcacatcgaggccggcaaggtgcccttcccggcctacaggtgccccgccggctacgacgccgacaggctgaagcacctgaagatctag

SEQ ID NO: 415 - protein, 89 aa, Sorghum bicolor
  misc_feature (7)..(57): Pfam Name: Myb_DNA-binding Pfam Description: Myb-like DNA-binding domain
  misc_feature: Ceres Annot ID no. 8667653
  misc_feature: Bit score of 152.6 for HMM based on sequences of Figure 7
  misc_feature: Functional Homolog Of SEQ ID NO. 323
MSLSSTRAQWTAKQNKLFEQALAVYDRDTPDRWHNIARAVGGGKSADEVRRYYELLVKDVEHIEAGKVPFPAYRCPAGYDADRLKHLKI

SEQ ID NO: 416 - protein, 90 aa, Oryza sativa subsp. japonica
  misc_feature (6)..(56): Pfam Name: Myb_DNA-binding Pfam Description: Myb-like DNA-binding domain
  misc_feature: Public GI ID no. 115465643
  misc_feature: Bit score of 143.4 for HMM based on sequences of Figure 7
  misc_feature: Functional Homolog Of SEQ ID NO. 323
MAQQARAQWPQKQNKLFEQALAVYDKETPDRWHNIARAVGGGKSAEDVKRYYEMLEEDIKHIESGKVPFPAYRCPAAAGYQAERLKHLKI

SEQ ID NO: 417 - protein, 126 aa, Oryza sativa subsp. japonica
  misc_feature (24)..(74): Pfam Name: Myb_DNA-binding Pfam Description: Myb-like DNA-binding domain
  misc_feature: Public GI ID no. 5091605
  misc_feature: Bit score of 130.9 for HMM based on sequences of Figure 7
  misc_feature: Functional Homolog Of SEQ ID NO. 323
MASAAGSKQQQAMMSLPSSRGGGGGGWTQRQNKQFECALAVYDKETPDRWHNIARYMGGAKSADEVRRHFDHLVEDVSRIESGRVPFPRYSSSSSSRGADDGNRLLTVFHLSSVPRTRNANHKFNT

SEQ ID NO: 418 - protein, 111 aa, Oryza sativa subsp. indica
  misc_feature (24)..(74): Pfam Name: Myb_DNA-binding Pfam Description: Myb-like DNA-binding domain
  misc_feature: Public GI ID no. 125553458
  misc_feature: Bit score of 130.2 for HMM based on sequences of Figure 7
  misc_feature: Functional Homolog Of SEQ ID NO. 323
MASAAGSKQQQAMMSLPSSRGGGGGGWTQRQNKQFECALAVYDKETPDRWHNIARYMGGAKSADEVRRHFDHLVEDVARIESGRVPFPRYSSSSSSRGADDGNRSRYLKYQ

SEQ ID NO: 419 - DNA, 255 bp, Populus balsamifera subsp. trichocarpa
  misc_feature: Ceres Annot ID no. 1510435
  misc_feature: Encodes the peptide sequence at SEQ ID NO. 420
atggcatcaagttctttcccgcagcccagcacaaattggtcagccgaacaaaacaagttgttcgaaaatgctcttgcgatatatgataaggacactccggatcgttgggggaaaatagccaagattgtcaaaggaacaaccgaggatgaagtaaagcagcaatacgagatccttcttgatgatataaagagcattgagtcggacaaagtcccgctaccgaattacaagaacgaaggaagcagctgcagtaactaa

SEQ ID NO: 420 - protein, 84 aa, Populus balsamifera subsp. trichocarpa
  misc_feature (10)..(59): Pfam Name: Myb_DNA-binding Pfam Description: Myb-like DNA-binding domain
  misc_feature: Ceres Annot ID no. 1510435
  misc_feature: Bit score of 111.1 for HMM based on sequences of Figure 7
  misc_feature: Functional Homolog Of SEQ ID NO. 323
MASSSFPQPSTNWSAEQNKLFENALAIYDKDTPDRWGKIAKIVKGTTEDEVKQQYEILLDDIKSIESDKVPLPNYKNEGSSCSN

SEQ ID NO: 421 - protein, 85 aa, Oryza sativa subsp. japonica
  misc_feature (11)..(60): Pfam Name: Myb_DNA-binding Pfam Description: Myb-like DNA-binding domain
  misc_feature: Public GI ID no. 115438765
  misc_feature: Bit score of 125.0 for HMM based on sequences of Figure 7
  misc_feature: Functional Homolog Of SEQ ID NO. 323
MASMSVSSSRAPQWTARQNEQFERALAVYDRDTPERWHNIARAVAGKSADEVKLYYDLLVEDVKRIETGKVPFPAYRCPQPAIAG

SEQ ID NO: 422 - protein, 90 aa, Antirrhinum majus
  misc_feature (8)..(57): Pfam Name: Myb_DNA-binding Pfam Description: Myb-like DNA-binding domain
  misc_feature: Public GI ID no. 112292438
  misc_feature: Bit score of 121.1 for HMM based on sequences of Figure 7
  misc_feature: Functional Homolog Of SEQ ID NO. 323
MASSSMTSSSWTQKQNKQFEEALAMYGNDTPDCWQNIARKVGGKSAEEIRRHYEVLVKEIMKIETDQVPIPNYNKVKGSNSRGYGNYRGF

SEQ ID NO: 423 - DNA, 330 bp, Oryza sativa
  misc_feature: Ceres Annot ID no. 1770841
  misc_feature: Encodes the peptide sequence at SEQ ID NO. 424
atgagttcatcatggacgacgaagcagaacaagctgttcgagagggcgctggcgacatacgacaaagacacgccgggccgctggcagaacgtggcgcgggcagtgggtggtggaaagacggccgaggaggtgaagaggcactacgacaagctgcttcaagacctgcaccacattgagtcggcaggccgtcagggttcccaatacggcggcagcagcagcagcaaatccaaaggtggcagcagcagcggggagcagagatatcggaacagagactggaagcagcaaccagggctccatagtggtgccgtgaaaagagcctctcagtattag

SEQ ID NO: 424 - protein, 109 aa, Oryza sativa
  misc_feature (2)..(52): Pfam Name: Myb_DNA-binding Pfam Description: Myb-like DNA-binding domain
  misc_feature: Ceres Annot ID no. 1770841
  misc_feature: Bit score of 105.1 for HMM based on sequences of Figure 7
  misc_feature: Functional Homolog Of SEQ ID NO. 323
MSSSWTTKQNKLFERALATYDKDTPGRWQNVARAVGGGKTAEEVKRHYDKLLQDLHHIESAGRQGSQYGGSSSSKSKGGSSSGEQRYRNRDWKQQPGLHSGAVKRASQY

SEQ ID NO: 425 - DNA, 2145 bp, Arabidopsis thaliana
  misc_feature: Ceres Annot ID no. 878355
  misc_feature: Encodes the peptide sequence at SEQ ID NO. 426
actctcaatatcactattaaatatctttctcttttcacttcttcactttcctcgattcctgagttttcgatccttttgttctctaaccaccggtttcctctttaaccggtctctggataatcatcataatcattaggatcatcaagataaggaatctttttgagtatatctctacaccaaatcgaatctatggatcaaaaagttagacagtttgaggtttgcactcaagacggtagcgttgatcgtcacggcaatccagctatccgagctaataccggcaaatggctcactgctattctcattctagtgaatcaaggactagctacgcttgcgttcttcggtgtaggagtgaatttggttctgtttctgactcgagtgatgggacaagacaatgcagaagcggctaataatgttagtaaatggacaggaactgtctatatcttctctttgcttggtgctttcctcagtgactcttattggggacgttacaagacttgtgctatctttcaagcaagtttcgttgcagggttgatgatgttatctttatctactggtgcgttattgcttgaaccaagtggttgtggagttgaagattcgccgtgtaagcctcattcgacgtttaagacggttctgttttatctgtcggtgtatctaatcgcgttagggtatggtggttatcagccgaacatagctacttttggagctgatcagtttgatgcggaggattccgttgaaggacactcgaaaatcgcgtttttcagttacttttacttggctctgaatcttggatcgctcttctcaaatactgtcttgggttactttgaggatcaaggggaatggccgcttggattttgggcgtctgctggctctgcttttgcggggttagtgcttttcttgattggcacgccaaagtaccgacactttacgcctagagagagtccttggtctagattctgccaagtgttggttgctgcaacaagaaaggctaagattgatgtgcaccatgaagagttgaatctctatgattctgagactcaatacactggagataagaagattcttcataccaaaggcttcagattcttggatagagctgctattgttacacctgatgatgaggctgagaaagtagagagcggatcgaaatacgatccatggaggctctgctcggtgactcaagtcgaagaagtgaaatgtgtattaagactcttaccaatctggctctgcaccatcctctactctgtggttttcacccaaatggcttcactgttcgttgtgcaaggagcagcgatgaagacaaacatcaaaaacttccggattccagcttcaagcatgtctagtttcgacattctcagtgtcgccttcttcatcttcgcatacaggcggtttcttgatccactctttgcaagacttaacaaaacagaacgcaacaaaggtctcactgagcttcagaggatggggattgggcttgtgattgcgataatggcgatgatttccgcaggaatcgtagagatacacagactgaaaaataaggaaccggaaagtgctacttcgatctcaagctccagcactttgagcattttttggcaagtacctcagtacatgttgataggtgcatcagaagtgttcatgtacgttggtcaactcgagttcttcaacagccaagcaccaaccgggctaaagagctttgcaagcgcgctatgtatggcttcaatatctcttgggaactatgtaagcagtttgttagtttccattgtcatgaagatctctacaacagatgatgtgcatggctggattcctgaaaatctcaacaaaggacacttggagagattctacttccttttagctggtctaaccgctgctgatttcgtggtttacttgatttgtgccaaatggtacaagtatattaaatctgaagcaagtttctctgagtccgtaactgaagaggaggaagtctgagtcaggagctagagagttttgtgttttattttaatgctgtgaagctttttacagtaatttgtttaaagctgagcttgttctgtgatataaactggtcttattgtgtttttatttttgggttatactcttgtgcaaagtttagttgatgtttctcaataaaggataagttgattccacagttccaac

SEQ ID NO: 426 - protein, 589 aa, Arabidopsis thaliana
  misc_feature (100)..(509): Pfam Name: PTR2 Pfam Description: POT family
  misc_feature: Ceres Annot ID no. 878355
  misc_feature: Bit score of 1309.7 for HMM based on sequences of Figure 11
MDQKVRQFEVCTQDGSVDRHGNPAIRANTGKWLTAILILVNQGLATLAFFGVGVNLVLFLTRVMGQDNAEAANNVSKWTGTVYIFSLLGAFLSDSYWGRYKTCAIFQASFVAGLMMLSLSTGALLLEPSGCGVEDSPCKPHSTFKTVLFYLSVYLIALGYGGYQPNIATFGADQFDAEDSVEGHSKIAFFSYFYLALNLGSLFSNTVLGYFEDQGEWPLGFWASAGSAFAGLVLFLIGTPKYRHFTPRESPWSRFCQVLVAATRKAKIDVHHEELNLYDSETQYTGDKKILHTKGFRFLDRAAIVTPDDEAEKVESGSKYDPWRLCSVTQVEEVKCVLRLLPIWLCTILYSVVFTQMASLFVVQGAAMKTNIKNFRIPASSMSSFDILSVAFFIFAYRRFLDPLFARLNKTERNKGLTELQRMGIGLVIAIMAMISAGIVEIHRLKNKEPESATSISSSSTLSIFWQVPQYMLIGASEVFMYVGQLEFFNSQAPTGLKSFASALCMASISLGNYVSSLLVSIVMKISTTDDVHGWIPENLNKGHLERFYFLLAGLTAADFVVYLICAKWYKYIKSEASFSESVTEEEEV

SEQ ID NO: 427 - DNA, 1821 bp, Populus balsamifera subsp. trichocarpa
  misc_feature: Ceres Annot ID no. 1472338
  misc_feature: Encodes the peptide sequence at SEQ ID NO. 428
atggcctgcttaaatatttgcaaagaggaaggaagcgtgcaggggaagctcgtgaagaaggagcaggaggtttgcactagggatggaagcgttgatcgacatggcgatcctgcaatccgggggaggactgggacttggttcgctggaatcctcatattagtgaatcaagggctggcgacgttggccttctttggggtaggagtgaacttggttctgtttttgacaagagtgttgggtcaagacaatgccgaagctgcaaacaacgtcagcaaatggactggaactgtttacatattctctcttctcggcgccttcctcagcgactcttactgggggaggtacaagacttgtgctatcttccaggccatcttcgtcactggtctggtattgttgtcactgtcttcctacttattcttactcaaaccgagaggctgtggtgatgaacattctccatgtggatcccattcaacataccagaatgtctttttctacttctccatctatcttgttgcccttggaaatggaggctaccagcctaacattgctacctttggggctgatcagtttgatgaagaggaccctaaagaaggccactctaagatagctttctttagctacttttacttggctctcaaccttggttctctcttttcgaacaccatattgggctattttgaggaccggggcatgtgggcgttaggattctgggcatctgctggctctgctcttttggcactggtcttgtttctcattgggactcccaggtatagacacttcacccccaagggcaaccccctctctaggtgttgccaggtgatggttgctgcaacaagaaaatggaaggttcagaggatgccaaatcaaggtgatgatcagtttgaatcggatgtcccaaaggacggttccaaaaatggggatagaaagatactacacacccaaggattcagattcttggatagagctgcaattattacatccaaggattatacagagaatcgcattcacgatccatggcgtgtctgcacagtaaatcaagttgaagaatttaaatgcatcctacgactcctccctatctggctgtgcacaattctttactctgtagttttcactcaaatggcatcactcttcgtcgaacaaggtgctgatatgaaaactacgatttcgaaattccacattcctccagcaagcatgtctagtttcgacatactcagtgttgcggctttcatattcatctataggagagttcttgatccccttgttgccagaataagaaaggaccctaagggcctgacagagcttcagaggatggggattggtctagttatcgcaataattgcaatggtttcggcagggattgtagagctattcaggttgaagtacgcaagaaaagactgtccaagatgcgaaagtgcgagttctttgagcatactttggcaaattcctcaatatgttctgataggagcatctgaggtgttcatgtatgtggggcaattagaattcttcaatgggcaagcacctgatggattgaagagcttcggcagtgcactttgcatgacatcaatatctctaggcaactatgtgagtagcttgctagtaacagtcgtaatgaagatatctaccagagatgagatgccaggatggatcccaggaaaccttaacaagggtcatctagacagatttttcttcctcttggcagttttgacaaccgcagatcttgttctgtacattatctgtgctagatggtacaagtacatcaagtttgagaggcagcaggaagcggatagtatattaagcaatgaagaggcagaccttagagtttga

SEQ ID NO: 428 - protein, 606 aa, Populus balsamifera subsp. trichocarpa
  misc_feature (114)..(521): Pfam Name: PTR2 Pfam Description: POT family
  misc_feature: Ceres Annot ID no. 1472338
  misc_feature: Bit score of 1378.9 for HMM based on sequences of Figure 11
  misc_feature: Functional Homolog Of SEQ ID NO. 426
MACLNICKEEGSVQGKLVKKEQEVCTRDGSVDRHGDPAIRGRTGTWFAGILILVNQGLATLAFFGVGVNLVLFLTRVLGQDNAEAANNVSKWTGTVYIFSLLGAFLSDSYWGRYKTCAIFQAIFVTGLVLLSLSSYLFLLKPRGCGDEHSPCGSHSTYQNVFFYFSIYLVALGNGGYQPNIATFGADQFDEEDPKEGHSKIAFFSYFYLALNLGSLFSNTILGYFEDRGMWALGFWASAGSALLALVLFLIGTPRYRHFTPKGNPLSRCCQVMVAATRKWKVQRMPNQGDDQFESDVPKDGSKNGDRKILHTQGFRFLDRAAIITSKDYTENRIHDPWRVCTVNQVEEFKCILRLLPIWLCTILYSVVFTQMASLFVEQGADMKTTISKFHIPPASMSSFDILSVAAFIFIYRRVLDPLVARIRKDPKGLTELQRMGIGLVIAIIAMVSAGIVELFRLKYARKDCPRCESASSLSILWQIPQYVLIGASEVFMYVGQLEFFNGQAPDGLKSFGSALCMTSISLGNYVSSLLVTVVMKISTRDEMPGWIPGNLNKGHLDRFFFLLAVLTTADLVLYIICARWYKYIKFERQQEADSILSNEEADLRV

SEQ ID NO: 429 - protein, 589 aa, Vitis vinifera
  misc_feature (98)..(506): Pfam Name: PTR2 Pfam Description: POT family
  misc_feature: Public GI ID no. 157344683
  misc_feature: Bit score of 1376.7 for HMM based on sequences of Figure 11
  misc_feature: Functional Homolog Of SEQ ID NO. 426
MYLNPLSECTFDGSVDRHGHPAVRARTGNWVTAILILVNQGLATLAFFGVGVNLVLFLTRVLGQDNATAANNVSKWTGTVYIFSLLGAFLSDSYWGRYKTCAIFQVIFVIGLVLLSLSSYIFLLKPNGCGDKEFPCGSHSTFEISFFYLSIYLIALGNGGYQPNIATFGADQFDEDNPKESHSKVAFFSYFYLALNLGSLFSNTILGYFEDGGRWVLGFWASSASAILALILFLFGIPRYRHFKPSGNPLSRFCRVVVAATRKWKVEMPPEGEDLYEVDGDDCSGNCRRKMLHTQGFKFLDKAAVLTAKEREQEDKESRSPWRICTVTQVEEVKCILRLLPIWLCTILYSVVFTQMASLFVEQGAAMKTTLLGFHIPPASMSSFDIVSVAAFIFIYRRVLDPLVARLKGTKARGLTELQRMGIGLIIAIIAMVAAGIVEWFRLKYAKKDCRQCESESSLSIFWQIPQYVLIGASEVFMYVGQLEFFNDQAPDGLKSFGSALCMTSISLGNYVSSLLVTIVMKFSTRDQMPGWIPSNLNKGHLDRFYFLLAALTMADFGVYIICAKWYKSIKLEGKYEDSNSKGSDDVMV

SEQ ID NO: 430 - protein, 589 aa, Medicago truncatula
  misc_feature (98)..(506): Pfam Name: PTR2 Pfam Description: POT family
  misc_feature: Public GI ID no. 87240677
  misc_feature: Bit score of 1329.2 for HMM based on sequences of Figure 11
  misc_feature: Functional Homolog Of SEQ ID NO. 426
MVNKELEVCTLDGSIDSHGHPAVRERTGTWFAGILILVNQGLATLAFFGVGVNLVLFLTRVMGQDNADAANNVSKWTGTVYIFSLLGAFLSDSYWGRYITCAIFQVIFVVGLVALSLTSYIFLLKPNGCGSKELPCGTHSSYETTLFYVSIYLVALGNGGYQPTIATFGADQFDESDPSEQHSKIAFFSYFYLALNIGSLFSNTILDYFEDDGLWTLGFCVSAGSAALALVLFLCGTSKYRYFKPVGNPLPRFCQVFVAAIRKWKVQMFDGEDKLHEVEDCLSNGGRKMYHTQGFRFLDKAAFITPKDLKQMEENKCSPWFLSTVTQVEEVKCILRLLPIWLCTILFSVVFSQMASLFVEQGAAMETKISTFHIPPASMSSFDILSVVSFIFIYRRILDPLVARFTKKSKGITELQRMGIGLVLAIIAMVSAGLVEIFRLKYAIKEEKNCSHCEGTSSLSIFWQVPQYVLIGASEVFMYVGQLEFFNSQAPDGLKSFGSALCMTSISLGNYVSSLLVAIVMKISTRNEGMLGWIPGNLNMGHLDRFYFLLAALTAADLLVYIAMARWYKYVKFHGNNIEQGNNIEENVV

SEQ ID NO: 431 - protein, 584 aa, Oryza sativa subsp. japonica
  misc_feature (103)..(504): Pfam Name: PTR2 Pfam Description: POT family
  misc_feature: Public GI ID no. 115448297
  misc_feature: Bit score of 1337.7 for HMM based on sequences of Figure 11
  misc_feature: Functional Homolog Of SEQ ID NO. 426
MAPTAVDSKRISDITEDGSMDRRGNPAVKAKTGNWRSSILLLVNYGLVTCAFFGVGVNLVVFLRRVLHQDNAEAANSISKWTGTVYIFSLIGAFMSDSYWGRYITCAIFQMIYVTGLVILSLASWFLLVKPTGCGAAGEHCDAPSSAGVALFYLSTYMIAFGNGGYQPSIATFGSDQFDETDPREARSKVAFFSYFYLALNVGSLFSNTVLVYYEDEGRWVMGFWVSAAAAAMALVLFLLGTPNYRHFKPTGNPLTRIAQVFVAAFRKWRAEVPRSELLHEVDGDESQIAGIRKILHSDQIRFLDKAATVTEEDYCTPENMQDPWRLCTVTQVEEVKCILKMLPIWLCTIVYSVVFTQMASLFVEQGTTMNTNIGSFHVPAASMSVFDILSVLAFIAIYRRVLVPVMSRLSGNPQGLTELQRMGVGLVVGMAAMVVAGVVEVERLKRVGAPDQPSSLSVLWQVPQYALIGASEVFMYVGQLEFFNGQAPDGVKSFGSSLCMASISLGNYVSIMLVSVVTSLTAGDRRPGWIPGNLNSGHLDRFYFLLAALSLVDLAVYVACAVWYKGIKLDSNEEKANKITVHV

SEQ ID NO: 432 - DNA, 2233 bp, Panicum virgatum
  misc_feature: Ceres Clone ID no. 1844568
  misc_feature: Encodes the peptide sequence at SEQ ID NO. 433
gcatgttcagctgttacactttcgcaatggataaccctgttcatccctagctaacacgaggtcttatatatcacaggctaaatcttgctggcaatacgatctttcaacttctccttacagcaagactgaagaaattcctgaacaagctgcggagaacagattaagcaagcaaggctgatagtgaagtttcagaaagctcattgaacgacgtgatggatcccaccactgttgaatcgaaatgggtgtctcccaccactgaagatgggtcaatggacaggagaggaaacccagctgccaaagcagcatctggaagatggagatctgccatcctgctgctcgccaactacgggctcgtgacgtgcgccttcttcggcgtcggtgtgaacctggtggtgttcctgcggcgggtgctccaccaggacaacgccgaggcggccaacaacatcagcaagtggaccggcaccgtctacatcttctcgctcatcggcgccttcctcagcgactcctactggggccgttacgtcacctgcgccatcttccagatcatctacgtgacgggcctggtgattctgtcgcttgcgtcatggttcttgctggtgaagccctccggctgcggcggcgtcgatgcgcgctgcgacgagccgtcggcgcccggcgtcgcgctcttctacctgtccacctacatgatcgcgttcggcaacggcgggtaccagccttcgatcgccacgttcgggtcggaccagttcgacgagacggaccccaaggaggcgcgctccaaggtcgccttcttcagctacttctacctggcgctcaacgtcgggtccctcttctccaacacggtgctggtgtactacgaggactcgggccgctgggtcatggggttctgggtctcggcggccgccgcggcgctggcgctcgtgctcttcctgctcggcacccccaactaccggcacttcaagccgagcggcaacccgctgacgcgcgtcgcgcaggtgttcgtcgccgcgctccgcaagtggcacgcggaggtgccccgagaagagttcctccacgaggtggaaggagaggaccccaaggtctcgggcatccgcaagatccttcacagcgacgagctcaggttcctcgacagggcggcgacggtcaccgaggaggagtacggcgcgccggagaagatgaaggacccgtggcggctctgcacggtgacgcaggtggaggaggtgaagtgcatcctgaagatgctgcccatctggctgtgcacgatcgtgtactcggtggtgttcacccagatggcgtccctgttcgtggagcagggcgccaccatgaacaccaacatcgggtcgttccacttccccgccgcgagcatgtcgctgttcgacatcctcagcgtgctggcgttcatcgccatctaccgccgcgtgctggtccccgtgatggcgcggctgtcgggcaacccgcagggcctgacggagctgcagcgcatgggcgtggggctcgtgatcggcatggcggccatggtggtggcgggcgcggtggaggtggagcggctgcggcgcgtggcggccccggaccagccgagctcgctgagcgtgctgtggcaggtgccgcagtacgcgctgatcggggcgtcggaggtgttcatgtacgtggggcagctggagttcttcaacgggcaggcccccgacggcgtgaagagcttcggcagcgcgctgtgcatggcgtccatctcgctggggaactacgtgagcatcatgctggtgagcgtggtcaccagcctcaccgccggggagaggcggcccgggtggatcccggggaacctcaactccggccacctcgacaggttctacttcctcctcgccgcgctctcgctagtggacctcgccgtgtacgtcgcgtgcgcgacgtggtacaagggcatcaagctcgatggcggcggcgagacgaggaagaaccccgcgcacgtttaaacactgggcctgggccgttcttttgggtgttctggtttggagacgtgccgtgctggcccgtagaaaataaaatgtcaaagaactggcatgtggtccgtgttggatggcctattttgttctgtgtctttggtctagctccaagaatcagtctcagaactccatgtaatgctgctatgtatgtaaatataataaatatagtatatgtatggatgtctgctgaacttgcatgcagccaacctgtcaaagacagacttttttgtgtgtgatcg

SEQ ID NO: 433 - protein, 583 aa, Panicum virgatum
  misc_feature (103)..(504): Pfam Name: PTR2 Pfam Description: POT family
  misc_feature: Ceres Clone ID no. 1844568
  misc_feature: Bit score of 1338.2 for HMM based on sequences of Figure 11
  misc_feature: Functional Homolog Of SEQ ID NO. 426
MDPTTVESKWVSPTTEDGSMDRRGNPAAKAASGRWRSAILLLANYGLVTCAFFGVGVNLVVFLRRVLHQDNAEAANNISKWTGTVYIFSLIGAFLSDSYWGRYVTCAIFQIIYVTGLVILSLASWFLLVKPSGCGGVDARCDEPSAPGVALFYLSTYMIAFGNGGYQPSIATFGSDQFDETDPKEARSKVAFFSYFYLALNVGSLFSNTVLVYYEDSGRWVMGFWVSAAAAALALVLFLLGTPNYRHFKPSGNPLTRVAQVFVAALRKWHAEVPREEFLHEVEGEDPKVSGIRKILHSDELRFLDRAATVTEEEYGAPEKMKDPWRLCTVTQVEEVKCILKMLPIWLCTIVYSVVFTQMASLFVEQGATMNTNIGSFHFPAASMSLFDILSVLAFIAIYRRVLVPVMARLSGNPQGLTELQRMGVGLVIGMAAMVVAGAVEVERLRRVAAPDQPSSLSVLWQVPQYALIGASEVFMYVGQLEFFNGQAPDGVKSFGSALCMASISLGNYVSIMLVSVVTSLTAGERRPGWIPGNLNSGHLDRFYFLLAALSLVDLAVYVACATWYKGIKLDGGGETRKNPAHV

SEQ ID NO: 434 - DNA, 2101 bp, Triticum aestivum
  misc_feature: Ceres Clone ID no. 797829
  misc_feature: Encodes the peptide sequence at SEQ ID NO. 435
tacggagtgacagatacagaccgggcgtgcgagggagggaggaagggagctcggaggaagcagagggatcccatccgctccggcggtgccaggaagctgttcctctgagccgctgcagcgcgtagcctgactgagcagcgagagacaagcagcaaggtcagcagccatgggggaggtcgcggcggagctgtacacccaggatggcaccatcgacatcaagggcaacccggccctcaagaaggacaccggcaactggcgcgcatgcccctacatcctcgcgaacgagtgctgcgagcggctggcctattacggcatgagcaccaacctcgtcaacttcatgaaggaccggatgggcatggccaacgccgccgccgccaacaacgtcaccaactggggcggcacctgctacatcacgccgctcatcggcgccttcctcgccgacgcctacctcggccgcttctggaccatcgcctccttcatgatcatctacatcttcggcctcggcctgctcaccatggccacctccgtgcacggcctcgtgcccgcctgcgcctccaagggcgtctgcgaccccacgccgggccagtcggcggcggtcttcatcgcgctctacctcatcgcgctcggcaccggcgggatcaagccatgcgtgtcgtcgttcggggccgaccagttcgacgagcacgacgacgtggagcgcaagagcaagagctcgtttttcaattggttctacttctccatcaacatcggcgcgctggtggcctcgtccgtcctggtgtacgtgcagacgcatgtcgggtggagctggggcttcggcatccccgccgtcgtcatggccatcgccgtcggcagcttcttcgtcggcacgccgctctacaggcaccagcgccccggcggcagcccgctcacccgcatcgcgcaggtgctcgtcgccgccacgcgcaagctcggcgtccccgtcgacgggtcggcgctgtacgagaccgcggacagggagtccggcatcgagggcagccgcaagctggagcacacggagcagttcaggttcctcgacaaggcggccgtggagacgcaggcggacaagacggccaccgggccgtcgccgtggcggctgtgcacggtgacgcaggtggaggagctcaagagcgtggtgcggctgctgcccatctgggcgagcggcatcgtcttcgccacggtgtacgggcagatgagcaccatgttcgtgctgcagggcaacaccctggacgcctccatggggcccaagttcaagatcccctccgcctccctctccatcttcgacaccctcagcgtcatcgcctgggtgcccgtctacgaccgcatcctcgtccccgccgtgcgctccgtcaccggccggccccgcggcttcacccagctccagcgcatgggcatcggcctcgtcgtctccatgttcgccatgctcgccgccggcgtgctcgagctcgttcgcctccgcaccatcgcgcagcgcggcctctacggggagcacgacgtcgtgcccatctccatcttctggcaggtgccgcagtacttcatcatcggcgccgccgaggtgttcaccttcgtgggccagctcgagttcttctacgaccaggcgcccgacgccatgaggagcatgtgctccgcgctctccctcaccaccgtcgccctcgggaactacctcagcacgctcctcgtcaccgtcgtggccaagctcaccaccaggggaggcaagcaagggtggatccccgacaacctcaacgtcggccacctcgactacttcttctggctgctcgccgccctcagcctcctcaacttcgccgtctacctcctcatcgccagctggtacacctacaagaagaccgccggagatgatcacccagacgccatagccaaagggggagctcatgattgatgcacatgaccagtaaataagtgagtgactatgtctgcggttggtgtatgaatgttgaaagcagaagaagaaagcaaggattgagagttcggataggtgaaattaagggaggacaatgaaatgcatggtgtgatttgtgacttcaagattcaggagtgctgccttgttgattaatatactagtgtcttg

SEQ ID NO: 435 - protein, 581 aa, Triticum aestivum
  misc_feature (98)..(499): Pfam Name: PTR2 Pfam Description: POT family
  misc_feature: Ceres Clone ID no. 797829
  misc_feature: Bit score of 1242.8 for HMM based on sequences of Figure 11
  misc_feature: Functional Homolog Of SEQ ID NO. 426
MGEVAAELYTQDGTIDIKGNPALKKDTGNWRACPYILANECCERLAYYGMSTNLVNFMKDRMGMANAAAANNVTNWGGTCYITPLIGAFLADAYLGRFWTIASFMIIYIFGLGLLTMATSVHGLVPACASKGVCDPTPGQSAAVFIALYLIALGTGGIKPCVSSFGADQFDEHDDVERKSKSSFFNWFYFSINIGALVASSVLVYVQTHVGWSWGFGIPAVVMAIAVGSFFVGTPLYRHQRPGGSPLTRIAQVLVAATRKLGVPVDGSALYETADRESGIEGSRKLEHTEQFRFLDKAAVETQADKTATGPSPWRLCTVTQVEELKSVVRLLPIWASGIVFATVYGQMSTMFVLQGNTLDASMGPKFKIPSASLSIFDTLSVIAWVPVYDRILVPAVRSVTGRPRGFTQLQRMGIGLVVSMFAMLAAGVLELVRLRTIAQRGLYGEHDVVPISIFWQVPQYFIIGAAEVFTFVGQLEFFYDQAPDAMRSMCSALSLTTVALGNYLSTLLVTVVAKLTTRGGKQGWIPDNLNVGHLDYFFWLLAALSLLNFAVYLLIASWYTYKKTAGDDHPDAIAKGGAHD

SEQ ID NO: 436 - protein, 591 aa, Physcomitrella patens subsp. patens
  misc_feature (101)..(507): Pfam Name: PTR2 Pfam Description: POT family
  misc_feature: Public GI ID no. 168033816
  misc_feature: Bit score of 1251.7 for HMM based on sequences of Figure 11
  misc_feature: Functional Homolog Of SEQ ID NO. 426
MNAVGGAPDSEYPQDGTVDLRGNPVLKANTGGWKACPYILGNECCERLAYYGIATNLVTYLSHELHQNPSTAANNVTNWSGTCYITTLIGAFLADAYLGRFWTIVVFSIIYFLGMVLLTLSAALPSLKPPSGEGVVASSTQLAVFYLALYLIALGTGGIKPCVSSFGADQFDENDVKEKKRKSSFFNWFYFTINIGALIASSALVYIQENVGWGWGFGIPAVAMGIAIVSFLIGSPLYRHQKPGGSPITRIAQVLVAATRKLSMKVQPNGKHLYEADDKESGIEGSRKLEHTEEFRFLDKAAIPRGDEELQGTRPSGWRLTSVTQVEEVKIVMRLLPIWASGIVFATVYSQMSTMFVQQGALMNVSMGKANIPSASLSIFDTISVIVCVVIYDRFLVPVVRKRTGHVRGFTQLQRMGIGLFISVLAMVVAAIVEIERLKLARRDGVAGNPQDEALPVESLTIFVQIPQYFLIGAAEVFTFVGQLEFFYDQAPDAMRSLMSALSLTTVALGNYLSSVLVTIVTEVTTKGGKPGWIPNNLNRGHLDYFFWMLAILSILNIIFYLVVAKFYTYKRVHNAADVGEDGKPSKSGYE

SEQ ID NO: 437 - protein, 594 aa, Picea sitchensis
  misc_feature (121)..(527): Pfam Name: PTR2 Pfam Description: POT family
  misc_feature: Public GI ID no. 116788004
  misc_feature: Bit score of 1291.6 for HMM based on sequences of Figure 11
  misc_feature: Functional Homolog Of SEQ ID NO. 426
MGVEGEGSVETALLEEGSISSVQTGKASEDEYTGDGSVDFWGRPSVKENTGNWRACPFILGNECCERLAYYGINTNLVTYLTKRLHQGNAAAAKSVTTWAGTCYLTPLFGAVLADAYWGRYWTIAAFSTIYFIGMATLTLSASVSSLKPPSCIGSDCPTANLAQYGVFFLGLYLIALGTGGIKPCVSSFGADQFDDTDPKEKKKKGSFFNWFYFSINVGALVSSSVLVWVQDNVGWGWGFGIPTLFMGLAIGSFFSGTPLYRLQKPGGSPVTRMCQVVVASLRKLRKTVPLDHSHLYEVQDRNSAIQGSRKLEHTDEFKCLDKSAIITDDDVRKGGFSNPWRLCTVTQVEEMKILLRMFPIWATGIVFAAVYSQISTMFVEQGMTLDTSIGSRFHIPPASLSVFDVVSVMIWVPVYDRVIVPIVSKYTKRERGFTELQRMGIGLFISILAMVAAALVEIRRLNIVKTYDLVYDKGTPVPMSIFWQIPQYFLVGASEVFTFVGQLEFFYDQSPDAMRSLCSALSLLTTALGNYLSSLIVTIVMFATTKGGNIGWIPDNLNEGHLDYYFWVLASLSVLNLLVYVSCAHRYKYKKAS

SEQ ID NO: 438 - protein, 583 aa, Hakea actites
  misc_feature (112)..(516): Pfam Name: PTR2 Pfam Description: POT family
  misc_feature: Public GI ID no. 149900503
  misc_feature: Bit score of 1297.0 for HMM based on sequences of Figure 11
  misc_feature: Functional Homolog Of SEQ ID NO. 426
MGSLEERLLVEDEPVKNDGIGLYTGDGSVDIDGKPVLKENTGKWRACPFILGTECCERLAYYGIATNLVTYLTSKLHEGNASAARNVTTWSGTCYLAPLIGAVLADSYWGRYWTIAVFSIIYFIGMGTLTLSASVAAFKPSPCVGSVCPAATPAQYAVFFCGLYLIALGTGGIKPCVSSFGADQFDDTDPVERVQKGSFFNWFYFSINIGALISSSFLVWIQDNAGWGLGFGIPTLFMGVAIISFFSGTPLYRFQKPGGSPLMRMCQVFVASFRKWNLDVPQDSSLLFELPDKTSAIEGSRKLEHSDELRCLDKAAVVSDLDVQQGDLTNPWRLCTVTQVEELKILIRMFPIWATGIVFSAVYAQMSTMFVEQGMVLDTTIGSFTIPPASLSTFDVLSVIVWVPMYDRLLVPLARKFTGKERGFSELQRMGIGLFISILSMTAAAIVEIRRLQIAKSLGLVDQNVAVPMSILWQIPQYFLVGASEIFTFIGQLEFFYDQSPDAMRSLCSALSLLTTALGNYLSSFILTMVTTITTRGGKPGWIPDNLNEGHLDYFFWLLAGLSFLNLVIYVFCAARYKCKKAS

SEQ ID NO: 439 - protein, 580 aa, Solanum lycopersicum
  misc_feature (109)..(513): Pfam Name: PTR2 Pfam Description: POT family
  misc_feature: Public GI ID no. 4102839
  misc_feature: Bit score of 1292.5 for HMM based on sequences of Figure 11
  misc_feature: Functional Homolog Of SEQ ID NO. 426
MKYLFSKNGGLLEDENSGLYTRDGSVDIKGNPVLKSETGNWRACPFILGNECCERLAYYGIAANLVTYLTKKLHEGNVSAARNVTTWQGTCYITPLIGAVLADAYWGRYWTIATFSTIYFIGMCTLTLSASVPAFKPPQCVGSVCPSASPAQYAIFFFGLYLIALGTGGIKPCVSSFGADQFDDTDPKERVKKGSFFNWFYFSINIGALISSSLIVWIQENAGWGLGFGIPAVFMGIAIASFFFGTPLYRFQKPGGSPLTRMCQVLVAVFHKWNLSVPDDSTLLYETPDKSSAIEGSRKLLHTDELRCLDKAAVVSDNELTTGDYSNAWRLCTVTQVEELKILIRMFPIWATGIVFSAVYAQMSTMFVEQGMVMDTAVGSFKIPAASLSTFDTISVIVWVPVYDKILVPIARRFTGIERGFSELQRMGIGLFLSMLCMSAAAIVEIRRLQLARDLGLVDEAVSVPLSIFWQIPQYFILGAAEIFTFIGQLEFFYDQSPDAMRSLCSALSLLTTALGNYLSSFILTVVTSITTRGGKPGWIPNNLNGGHLDYFFWLLAALSFFNLVIYVFLCQMYKSKKAS

SEQ ID NO: 440 - protein, 584 aa, Vicia faba
  misc_feature (114)..(518): Pfam Name: PTR2 Pfam Description: POT family
  misc_feature: Public GI ID no. 31088360
  misc_feature: Bit score of 1269.8 for HMM based on sequences of Figure 11
  misc_feature: Functional Homolog Of SEQ ID NO. 426
MGSVEDDSSRLEEALIQDEESKLYTGDGSVDFKGRPVLKKNTGNWKACPFILGNECCERLAYYGIATNLVKPILLAKLHEGNVSAARNVTTWQGTCYLAPLIGAVLADSYWGRYWTIAIFSMIYFIGMGTLTLSASIPALKPAECLGAVCPPATPAQYAVFFIGLYLIALGTGGIKPCVSSFGADQFDDTDSRERVKKGSFFNWFYFSINIGALISSSFIVWIQENAGWGLGFGIPALFMGLAIGSFFLGTPLYRFQKPGGSPLTRMCQVVAASFRKRNLTVPEDSSLLYETPDKSSAIEGSRKLQHSDELRCLDRAAVISDDERKRGDYSNLWRLCTVTQVEELKILIRMFPVWATGIVFSAVYAQMSTMFVEQGTMMDTSVGSFKIPAASLSTFDVISVIFWVPVYDRFIVPIARKFTGKERGFSELQRMGIGLFISVLCMSAAAIVEIKRLQLAKELDLVDKAVPVPLTIFLQIPQYFLLGAAEVFTFVGQLEFFYDQSPDAMRSLCSALSLLTTSLGNYLSSFILTVVLYFTTRGGNPGWIPDNLNKGHLDYFSGLAGLSFLNMFLYIVAAKRYKSKKAS

SEQ ID NO: 441 - DNA, 1821 bp, Sorghum bicolor
  misc_feature: Ceres Annot ID no. 8681236
  misc_feature: Encodes the peptide sequence at SEQ ID NO. 442
atgaagatgagggcgatcgtcgtggaaggaggggagatgagcgcgccgacgccgacgccgaagcaggacaagtgctgcgagtacacgctcgacggctccgtcgacatcaagggccgcccggcggtcaaggggaaatcaggaggatggcttgccggtgctctaatccttgtgaaccagggcctggcgacactagccttcttcggcgtgaacgtgaacctggtgctgttcctgacgcgggtgctggggcagagcaacgaagacgccgccaacaacgtcagcaagtggacgggcaccgtgtacatgttctccctcatcggcgccttcctcagcgactcctactggggacgctacaagacctgcgccatcttccaggccatctttgtgctcggcctcgcgctgctgtcggtgtcgtcgcacctctacctaatcaggccggacgggtgcggcatggagcacgcgccctgcggcccgcactccggcaaggagctggggatcttctacatcgcgctgtacatgatcgccttcggcaacggcgggtaccagcccaacatcgccaccctgggcgccgaccagttcgacgaggacgaccccgccgaggcgcactccaaggtctccttcttcagctacttctacctcgccctcaacctcggctcgctcttctccaacaccttcctcagctacctcgaggacaagggcagctgggcgctcggcttctgggcctccaccgccgccgccgccaccgcgctcctgcttttcctcagcgggacgctccggtatcgctatttccagcccggagggaacccgatcgggaggatttgccaggtcgccatcgccgcgtccaggaaatggaaggcgggcgcgtcgaccaccggagtggtcagcctgtacgagggcgacgagaaggcggatgccgccggtggcaggaagcttttgcacacgcaagggttcagtttcttggaccgcgcggcgcacgctgacacggactccaagctcggcgcgcgcgacccctggaagctgtgcacggtgacgcaggtggaggaggtcaagagcatcctgaggctcctccccatctggctctgcaccatcctctactcggtcgtcttcacccagatggcctcgctctttgtcgtgcagggcgccgcgatgcgccgcaccaccccgttctccggcttctccgtcccgccctccagcatgtcggccttcgacatcctcgccgtcgccaccacgatcttcttgtaccgccgcgccatctgcccgttcctggcgcggctcaccggccgcccggccggccccaccgagctgcagaggatgggcctcggcctggtcgtgggtgccctggccatggccacggccgggacggtcgagcacttccggaaggccagggccaccgcggcgatgagcagcgacctgcatatcatgtggcaggtgccgcagtacgcgctgatcggcgtgtcggaggtgatgatgtacgtcgggcagctcgagttcttcaacggccagatgcccgacgggctcaaaagcttcgggagcgcgctctgcatgatgtccatgtcgctcggcaactacttcagtgacgtcatcgtgagcgcggtcaccaggctcaccacgacgcgagggcggtccgggtggatcccggctgacctcaacgagggccacctcgacaagttctacttcctgctcgccgtgctggccgtcgcggacttcgcggtgtacctcgtgtgcgcgagccgctacgggagcggcaaggtggacgggaggagcagcgacgacgaggaggagggagcggccggtcaggtgacatccctgccggcttacgcatga

SEQ ID NO: 442 - protein, 606 aa, Sorghum bicolor
  misc_feature (117)..(517): Pfam Name: PTR2 Pfam Description: POT family
  misc_feature: Ceres Annot ID no. 8681236
  misc_feature: Bit score of 1256.2 for HMM based on sequences of Figure 11
  misc_feature: Functional Homolog Of SEQ ID NO. 426
MKMRAIVVEGGEMSAPTPTPKQDKCCEYTLDGSVDIKGRPAVKGKSGGWLAGALILVNQGLATLAFFGVNVNLVLFLTRVLGQSNEDAANNVSKWTGTVYMFSLIGAFLSDSYWGRYKTCAIFQAIFVLGLALLSVSSHLYLIRPDGCGMEHAPCGPHSGKELGIFYIALYMIAFGNGGYQPNIATLGADQFDEDDPAEAHSKVSFFSYFYLALNLGSLFSNTFLSYLEDKGSWALGFWASTAAAATALLLFLSGTLRYRYFQPGGNPIGRICQVAIAASRKWKAGASTTGVVSLYEGDEKADAAGGRKLLHTQGFSFLDRAAHADTDSKLGARDPWKLCTVTQVEEVKSILRLLPIWLCTILYSVVFTQMASLFVVQGAAMRRTTPFSGFSVPPSSMSAFDILAVATTIFLYRRAICPFLARLTGRPAGPTELQRMGLGLVVGALAMATAGTVEHFRKARATAAMSSDLHIMWQVPQYALIGVSEVMMYVGQLEFFNGQMPDGLKSFGSALCMMSMSLGNYFSDVIVSAVTRLTTTRGRSGWIPADLNEGHLDKFYFLLAVLAVADFAVYLVCASRYGSGKVDGRSSDDEEEGAAGQVTSLPAYA

SEQ ID NO: 443 - DNA, 1779 bp, Glycine max
  misc_feature: Ceres Annot ID no. 8519531
  misc_feature: Encodes the peptide sequence at SEQ ID NO. 444
atggaaccaggaatttgcaattctgtcaactccgtaaatgttgaagcaaccgagaaaaaggtgacaggaggaaatggaagctacacagagcagtcagacacaagctataagaagattaaaggaggttggaaaactgcaattatcttgttagcgaatcaagcactggctacactagctttctttggagttggagtgaacttggttctgtttctgacccgagtccttcgccaagacagtgctgaggctgctaacaatgtcagcaagtggaccggaactgtttacatattttcactcattggagccttcctcagtgattcttactggggacgatatttaacctgcgcaatctttcagttcatttttgttgtgggcttggggatgttgtcattgtcgtcttggcggtttttgatcaaaccggttggttgcggcaatgaagaaactacatgcttggaaccatcatcagtgggtgttggcattttctacttgtccatatatctagtggcatttggatatggagggcaccaacccaccttagcaacctttggtgcagatcaatttgacgagaagaacgaaaaacaaaagaacgcgagagaagctttcttctcttatttttactttgccctcaatgttggatctctgttctccaacactatattagtatactacgaggattcaggaatgtggacaatgggtttcttggtgtccttggcctcagctgttattgccttagtttcatacttagcaggatatcgaaaatatagatatgtaaagggatatgggaatccggtgataagggtagttcaggtgtttgtggccactgttagaaagtggaaggttggtccagccaaggaacaccaactttatgaggttgatggtccagaatctgccataaaagggagtagaaagattcatcacagcaatgattttagattcatggacaaggcagcaacaataacggagaaagatgcagttaatctcaagaatcactggcggctatgtactgtaactcaagttgaggaagccaaatgcgtactgagaatgctaccagtttggctatgtactataatttattcagttgtgtttacgcaaatggcttctctttttgtcgagcaaggggatgtgatgaacaacaagataggaaattttcacttgccagcagccagcatgtcagtgtttgatatctgcagtgtccttttatgcactggaatttatcgccaaatccttgttcctctagcaggaagatttagtggcaatcctaggggactaactgagcttcaaagaatgggagttggcctaattattggaatgttagctattcttgcagctggtgccacagagtttgaaaggctcaaacacattacacccggggaaaaggctagttctttgagtatattttggcaaatcccacagtatgttctagttggtgcttcagaagttttcatgtatgtgggtcaactggagttctttaatgggcaagccccagatggcataaaaagctttgggagctcactttgcatggcttcaatttctcttggaaactatgtgagtagcttgctggtgtacatggtgatgggaatcactgcaagaggcgagaatccgggatggattcccaataacttgaatgtggggcacatggataggtttttcttcctcgttgcagtgctaactgctcttgattttgtactctacttattatgtgctcgctggtacaagagcatcaaccttggagatggtgacatgggaagccaagaggacgaggaagtgatcagtaaagtttga

SEQ ID NO: 444 - protein, 592 aa, Glycine max
  misc_feature (111)..(509): Pfam Name: PTR2 Pfam Description: POT family
  misc_feature: Ceres Annot ID no. 8519531
  misc_feature: Bit score of 1264.8 for HMM based on sequences of Figure 11
  misc_feature: Functional Homolog Of SEQ ID NO. 426
MEPGICNSVNSVNVEATEKKVTGGNGSYTEQSDTSYKKIKGGWKTAIILLANQALATLAFFGVGVNLVLFLTRVLRQDSAEAANNVSKWTGTVYIFSLIGAFLSDSYWGRYLTCAIFQFIFVVGLGMLSLSSWRFLIKPVGCGNEETTCLEPSSVGVGIFYLSIYLVAFGYGGHQPTLATFGADQFDEKNEKQKNAREAFFSYFYFALNVGSLFSNTILVYYEDSGMWTMGFLVSLASAVIALVSYLAGYRKYRYVKGYGNPVIRVVQVFVATVRKWKVGPAKEHQLYEVDGPESAIKGSRKIHHSNDFRFMDKAATITEKDAVNLKNHWRLCTVTQVEEAKCVLRMLPVWLCTIIYSVVFTQMASLFVEQGDVMNNKIGNFHLPAASMSVFDICSVLLCTGIYRQILVPLAGRFSGNPRGLTELQRMGVGLIIGMLAILAAGATEFERLKHITPGEKASSLSIFWQIPQYVLVGASEVFMYVGQLEFFNGQAPDGIKSFGSSLCMASISLGNYVSSLLVYMVMGITARGENPGWIPNNLNVGHMDRFFFLVAVLTALDFVLYLLCARWYKSINLGDGDMGSQEDEEVISKV

SEQ ID NO: 445 - DNA, 1749 bp, Zea mays
  misc_feature: Ceres Annot ID no. 8631372
  misc_feature: Encodes the peptide sequence at SEQ ID NO. 446
atggatgctaccactgttgattccaaatggatctctcccgccactgaagatgggtccatggacaggcgaggaaacccagctgtcaagacaaccaccggaagatggagatctgccatcctgctgctagctaactatgggctcgcgacgtgcgccttcttcggcgtcggcgtgaacctcgtggtgttcctgcgccgggtgctccaccagggcaacgccgaggcggccaacagcatcagcaagtggactgggaccgtctacatcttctcgctcatcggcgccttcctcagcgactcctactggggccgatacgtcacgtgcgccgtcttccagatcatctacgtgatggggctggtggtcctgtcgctcgcgtcatggctcttgctggtgaagccgtccggctgcggcggcgtcaaggcgcactgcgacgggccgtcggcgcccggcgtcgcgctgttctacctgtccacctacatgatcgcgttcggcaacggagggtaccagccttccatcgcgacgttcgggtcggaccagttcgacgagacggaccccgaggaggcgcgctccaaggtggccttcttcagctacttctacctggcgctcaacgtcggctccctgctctccaacacggtgctggtgtactacgaggactcggggcggtgggtcatggggttctgggtctcggcggccgccgcggcgctggcgctcgtgctcttcctgctcggcacgcccggctaccgccacttcaagccgagcggcaacccgctcacccgcgtcgcgcaggtgttcgtcgccgcgctgcgcaagtggcgcgccgaggtcccgcgtggcgagctcctccacgaggtggtggaagcaggagaggaccctaaggtctcgggcatccgcaagatccttcacagcgacgggctcaggttcctcgacaaggcggcgacgatcacggaggaggaggaggaggagggtccgtggcggctctgcacggtgacgcaggtggaggaggtgaagtgcatcctgaggatgctgcccatctggctgtgcacgatcgtgtactcggtggtgttcacccagatggcgtcgctgttcgtggagcagggcgccaccatggacaccaacatcgggtcgttccacttccccgccgcgagcatgtcgctgttcgacgtcctcagcgtgctggcgttcatcgccatctaccggcgggtgctggtgcccgtcatggcgcggctgtcaggcaacccgcagggcctgaccgagctgcagcgcatgggcgtcgggctcgtgatcggcatggcggcgatggtggtggcgggcgtggtggaggtggagcggctgaagcgcgtggcggccccggaccagccgagctccctgagcgtgctgtggcaggtgccgcagtacgcgctgatcggggcgtcggaggtgttcatgtacgtggggcagctggagttcttcaacgggcaggcgcccgacggcgtcaagagcttcggcagcgcgctgtgcatggcgtccatctcgctggggaactacgtgagcatcatgctggtgagcgtagtcacgagcctcaccgccggtgagaagcgtccggggtggatccctgggaaccttaactcaggacacctcgacaggttctacttcctcctcgccgctctctcgctcgtggacctcgccgtctacgtcgcctgtgccatgtggtacaagggcatcaagcttgacggcggcgacggcgataacaggagaaaggtctctgcgcacgtctag

SEQ ID NO: 446 - protein, 582 aa, Zea mays
  misc_feature (103)..(501): Pfam Name: PTR2 Pfam Description: POT family
  misc_feature: Ceres Annot ID no. 8631372
  misc_feature: Bit score of 1317.4 for HMM based on sequences of Figure 11
  misc_feature: Functional Homolog Of SEQ ID NO. 426
MDATTVDSKWISPATEDGSMDRRGNPAVKTTTGRWRSAILLLANYGLATCAFFGVGVNLVVFLRRVLHQGNAEAANSISKWTGTVYIFSLIGAFLSDSYWGRYVTCAVFQIIYVMGLVVLSLASWLLLVKPSGCGGVKAHCDGPSAPGVALFYLSTYMIAFGNGGYQPSIATFGSDQFDETDPEEARSKVAFFSYFYLALNVGSLLSNTVLVYYEDSGRWVMGFWVSAAAAALALVLFLLGTPGYRHFKPSGNPLTRVAQVFVAALRKWRAEVPRGELLHEVVEAGEDPKVSGIRKILHSDGLRFLDKAATITEEEEEEGPWRLCTVTQVEEVKCILRMLPIWLCTIVYSVVFTQMASLFVEQGATMDTNIGSFHFPAASMSLFDVLSVLAFIAIYRRVLVPVMARLSGNPQGLTELQRMGVGLVIGMAAMVVAGVVEVERLKRVAAPDQPSSLSVLWQVPQYALIGASEVFMYVGQLEFFNGQAPDGVKSFGSALCMASISLGNYVSIMLVSVVTSLTAGEKRPGWIPGNLNSGHLDRFYFLLAALSLVDLAVYVACAMWYKGIKLDGGDGDNRRKVSAHV

SEQ ID NO: 447 - protein, 614 aa, Hordeum vulgare
  misc_feature (122)..(527): Pfam Name: PTR2 Pfam Description: POT family
  misc_feature: Public GI ID no. 151426449
  misc_feature: Bit score of 1253.5 for HMM based on sequences of Figure 11
  misc_feature: Functional Homolog Of SEQ ID NO. 426
MSANEGDLKMRVIAMGGEAASERRAAEEKLCEYTLDGSVDIKGRPAVKGKSGGWLAGGLILVNQGLATMAFFGVNVNLVLFLTRLVQQSNGDAANNVSKWTGTVYMFSLIGAFLSDSYWGRYKTCAIFQAIFVLGLGLLSLSSRLYLIRPVGCGTEHTPCASHSGTEMGIFYIALYMIAFGNGGYQPNIATFGADQFDEEDPAEAHSKVSFFSYFYMALNLGSLFSNTFLSYLQDHGKWVLGFWASTAAAATALLLFLSGTPQYRHAQPCGNPMASICQVASAACRNWKSGGVSPDVEILYEGDDKTDSGSRKLLHTKGFRFLDRAALTTEDTNSKLATCSKTRDQWRLCTVTQVEQVKSILRILPIWVCTILYSVVFTQMASLFVVQGAAMRRTTPLGSFSIPASSMSAFDILTVTTTIFLYRRAICPLLARLTGRPTGPTELQRMGLGLVLGAMAMANAGTVEHFRKASATTANGSELHILWQVPQYALIGVSEVMMYVGQLEFFNGEMPDGFKSFGSALCMMSMSLGNYFSDIIVSAVTKATAVDGRPGWIPADLNEGHLNKFYFLLAILSVADFAVYLVFAGRYRKSCKVEGRSDDEEEGSVDDEEACHA

SEQ ID NO: 448 - protein, 582 aa, Brassica rapa
  misc_feature (100)..(504): Pfam Name: PTR2 Pfam Description: POT family
  misc_feature: Public GI ID no. 192757675
  misc_feature: Bit score of 1309.3 for HMM based on sequences of Figure 11
  misc_feature: Functional Homolog Of SEQ ID NO. 426
MDQKVRHTEVCTQDGSVDRHGNPAIRAKTGKWLTAILILVNQGLATLAFFGVGVNLVLFLTRVMGQDNAEAANNVSKWTGTVYIFSLLGAFLSDSYWGRYKTCAIFQASFVAGLVMLSLSTGALLLEPSGCGVEESPCKPHSTVKTVIFYLSVYLIALGYGGYQPNIATFGSDQFDADDSVEGHSKIAFFSYFYLALNLGSLLSNTVLGYFEDQGAWPLGFWASAGSAFAGLVLFLAGTPKYRHFKPRESPWSRFCQVLVASTRKAKIDVNYDDMNLYDSETQRTGDKKILHTKGFRFLDRAAIVTPDDEAEKVESGSAYDPWRLCSVTQVEEVKCVLRLLPIWLCTILYSVVFTQMASLFVVQGAAMKTNIKDFRIPASSMSTFDILSVAFFIFAYRRFLDPLFARLNKTEPNKGLTELQRMGIGLVIAITAMISAGIVEIYRLKHKETASNSSSLSIFWQVPQYMMIGASEVFMYVGQLEFFNSQAPTGLKSFASALCMASISLGNYVSSLLVSIVMKISTRDDLPGWIPGNLNKGHLDRFYFLLAALTAADFVVYLVCAKWYKYIKSEASFSESIAEEE

SEQ ID NO: 449 - protein, 579 aa, Hordeum vulgare subsp. vulgare
  misc_feature (98)..(499): Pfam Name: PTR2 Pfam Description: POT family
  misc_feature: Public GI ID no. 2655098
  misc_feature: Bit score of 1231.9 for HMM based on sequences of Figure 11
  misc_feature: Functional Homolog Of SEQ ID NO. 426
MGEVAAEMYTQDGTVDIKGNPALKKDTGNWRACPYILANECCERLAYYGMSTNLVNFMKDRMGMANAAAANNVTNWGGTCYITPLIGAFLADAYLGRFWTIASFMIIYIFGLGLLTMATSVHGLVPACASKGVCDPTPGQSAAVFIALYLIALGTGGIKPCVSSFGADQFDEHDDVERKSKSSFFNWFYFSINIGALVASSVLVYVQTHVGWSWGFGIPAVVMAIAVGSFFVGTSLYRHQRPGGSPLTRIAQVLVAATRKLGVAVDGSALYETADKESGIEGSRKLEHTRQFRFLDKAAVETHADRTAAAPSPWRLCTVTQVEELKSVVRLLPIWASGIVFATVYGQMSTMFVLQGNTLDASMGPKFKIPSASLSIFDTLSVIAWVPVYDRILVPAVRSVTGRPRGFTQLQRMGIGLVVSMFAMLAAGVLELVRLRTIAQHGLYGEKDVVPISIFWQVPQYFIIGCAEVFTFVGQLEFFYDQAPDAMRSMCSALSLTTVALGNYLSTLLVTVVAKVTTRGGKQGWIPDNLNVGHLDYFFWLLAALSLVNFAVYLLIASWYTYKKTAGDSPDAKGGAHDQ

SEQ ID NO: 450 - protein, 580 aa, Zea mays
  misc_feature (97)..(499): Pfam Name: PTR2 Pfam Description: POT family
  misc_feature: Public GI ID no. 194690746
  misc_feature: Bit score of 1197.4 for HMM based on sequences of Figure 11
  misc_feature: Functional Homolog Of SEQ ID NO. 426
MGEVEDMYTQDGTVDMKGNPAVKKGTGNWRACPYILANECCERLAYYGMSTNLVNYMKTRLGQVNSVASNNVTNWQGTCYITPLIGAFFADAYMGRFWTIAIFMIIYIFGLALLTMASSVKGLVPTSCGDKDVCHPTDAQAAVVFVALYLIALGTGGIKPCVSSFGADQFDENDEREKKSKSSFFNWFYFSINIGALVASTVLVYVQTHVGWGWGFGIPAVVMAIAVGSFFVGTPLYRHQKPGGSPLTRIAQVLVACARKWNVAVPADKSRLHETVDGESVIEGSRKLEHSEQLACLDRAAVVTAEDGAEASPWRLCSVTQVEELKSVIRLLPIWASGIVFAAVYSQMSTMFVLQGNTLDQSMGPRFKIPSATLSMVDTISVIVWVPVYDRAIVPLVRSYTGRPRGFTQLQRMGIGLVVSIFSMVAAGVLDIVRLRAIARHGLYGEDDIVPISIFWQIPQYFIIGCAEVFTFVGQLEFFYDQAPDAMRSMCSALSLTTVALGNYLSTVLVTIVTHITTRHGRIGWIPENLNRGHLDYFFWLLAVLSLLNFLAYLVIASWYKYKKTADDYPGAKGEHGTEH

SEQ ID NO: 451 - DNA, 2186 bp, Triticum aestivum
  misc_feature: Ceres Clone ID no. 752925
  misc_feature: Encodes the peptide sequence at SEQ ID NO. 452
aaaggtggctgtggctcacacacacacacacacacacgcagagacaagagacaagagacagcgagtcagaccaggccatagggaatcccgcgcgcggggcgggcgacgactgaggcggagatcccttccggccggccgccgccgctcgtggacaccgaccaacataggaagcagcagttcctctgagccgctgccgctgcagtgcctagtctgactgagcggcgagaaagaagcaaggccagcagccatgggggaggtcgcggcggagatgtacacccaggatggcaccgtcgacatcaagggcaacccggccctcaagaaggacaccggcaactggcgcgcatgcccctacatcctcgcgaacgagtgctgcgagcggctggcctactatggcatgagcaccaacctggtcaacttcatgaaggaccggatgggcatggccaacgccgccgccgccaacaacgtcaccaactggggcggcacctgctacatcacgccgctcatcggcgccttcctcgccgacgcctacctcggccgcttctggaccatcgcctccttcatgatcatctacatcttcggcctcggcctgctcaccatggccacctccgtgcacggcctcgtgccgacctgcgccgccaagggcgtctgcgaccccacgccgggccagtcggcggccgtcttcatcgcgctctacctcatcgcgctcggcaccggcgggatcaagccctgcgtgtcgtcgttcggggcggaccagttcgacgagcacgacgacgtggagcgcaagagcaagagctccttcttcaactggttctacttctccatcaacatcggcgcgctggtggcctcgtccgtgctcgtgtacgtgcagacgcatgtcggctggagctggggcttcggcatccccgccgtcgtcatggccatcgccgtcggcagcttcttcgtcggcacgccgctctacaggcaccagcgccccggcggcagcccgctcacccgcatcgcgcaggtgctcgtcgccgccacgcgcaagctcggcgtcaccgtcgacgggtcggcgctgtacgagaccgcggacagggagtccggcatcgaggggagccgcaagctggagcacactgagcagttgaggttcctcgacaaggcggccgtcgagacgcaggcggacaagacggcggccaccgggccgtcgccgtggcggctgtgcaccgtgacgcaggtggaggagctcaagagcgtggtgcggctgctgcccatctgggcgagcggcatcgtcttcgccacggtgtatgggcagatgagcaccatgttcgtgctccagggaaacaccctggacgcctccattgggcccaagttcaagatcccctccgcctcgctctccatcttcgacaccctcagcgtcatcgcctgggtgcccgtctacgaccgcctcctcgtccccgccgtgcgctccgtcaccggccagccccgcggcttcacgcagctccagcgcatgggcatcggcctcctcgtctccatgttcgccatgctcgccgccggcgtgctcgagctcgtccgcctccgcaccatcgcgcagcgcggcctctacggcgagaaggacgtggtgcccatctccatcttctggcaggtgccgcagtacttcatcatcggcgccgccgaggtcttcaccttcgtgggccagctcgagttcttctacgaccaggcgcccgacgccatgaggagcatgtgctccgcgctctccctcaccaccgtcgcgctcgggaactacctcagcacgctgctcgtcaccgtcgtggccaagctcaccaccaggggaggcaagcaagggtggatccccgacaacctcaacgtcggccacctcgactacttcttctggctgctcgccgcgctcagcctcctcaacttcgccgtctacctcctcatcgccagctggtacacctacaagaagaccgccggagatgacacagacgccaaagccaaaggaggcgctgatgattgatgcaaatgaccagtgagtgagtgactctgcctggggttggtgtatgaatgttgaaagaggaagaagaaagcaaggattgagacttcagagttcagataggtgaaattaagggaggacaatgaaatgcatggtgtgatttgtgacttgaagattcaagagtgttgccttgttgatttatatactagtgtcttgg

SEQ ID NO: 452 - protein, 581 aa, Triticum aestivum
  misc_feature (98)..(500): Pfam Name: PTR2 Pfam Description: POT family
  misc_feature: Ceres Clone ID no. 752925
  misc_feature: Bit score of 1236.7 for HMM based on sequences of Figure 11
  misc_feature: Functional Homolog Of SEQ ID NO. 426
MGEVAAEMYTQDGTVDIKGNPALKKDTGNWRACPYILANECCERLAYYGMSTNLVNFMKDRMGMANAAAANNVTNWGGTCYITPLIGAFLADAYLGRFWTIASFMIIYIFGLGLLTMATSVHGLVPTCAAKGVCDPTPGQSAAVFIALYLIALGTGGIKPCVSSFGADQFDEHDDVERKSKSSFFNWFYFSINIGALVASSVLVYVQTHVGWSWGFGIPAVVMAIAVGSFFVGTPLYRHQRPGGSPLTRIAQVLVAATRKLGVTVDGSALYETADRESGIEGSRKLEHTEQLRFLDKAAVETQADKTAATGPSPWRLCTVTQVEELKSVVRLLPIWASGIVFATVYGQMSTMFVLQGNTLDASIGPKFKIPSASLSIFDTLSVIAWVPVYDRLLVPAVRSVTGQPRGFTQLQRMGIGLLVSMFAMLAAGVLELVRLRTIAQRGLYGEKDVVPISIFWQVPQYFIIGAAEVFTFVGQLEFFYDQAPDAMRSMCSALSLTTVALGNYLSTLLVTVVAKLTTRGGKQGWIPDNLNVGHLDYFFWLLAALSLLNFAVYLLIASWYTYKKTAGDDTDAKAKGGADD

SEQ ID NO: 453 - protein, 574 aa, Oryza sativa subsp. indica
  misc_feature (103)..(494): Pfam Name: PTR2 Pfam Description: POT family
  misc_feature: Public GI ID no. 125540898
  misc_feature: Bit score of 1301.5 for HMM based on sequences of Figure 11
  misc_feature: Functional Homolog Of SEQ ID NO. 426
MAPTAVDSKRISDITEDGSMDRRGNPAVKAKTGNWRSSILLLVNYGLVTCAFFGVGVNLVVFLRRVLHQDNAEAANSISKWTGTVYIFSLIGAFMSDSYWGRYITCAIFQMIYVTGLVILSLASWFLLVKPTGCGAAGEHCDAPSSAGVALFYLSTYMIAFGNGGYQPSIATFGSDQFDETDPREARSKVAFFSYFYLALNVGSLFSNTVLVYYEDEGRWVMGFWVSAAAAAMALVLFLLGTPNYRHFKPTGNPLTRIAQVFVAAFRKWRAEVPRSELLHEVDGDESQIAGIRKILHSDQIRFLDKAATVTEEDYCTPENMQDPWRLCTVTQVEEVKCILKMLPIWLCTIVYSVVFTQMASLFVEQGTTMNTNIGSFHVPAASMSVFDILSVLAFIAIYRRVLVPGLTELQRMGVGLVVGMAAMVVAGVVEVERLKRVGAPDQPSSLSVLWQVPQYALIGASEVFMYVGQLEFFNGQAPDGVKSFGSSLCMASISLGNYVSIMLVSVVTSLTAGDRRPGWIPGNLNSGHLDRFYFLLAALSLVDLAVYVACAVWYKGIKLDSNEEKANKITVHV

SEQ ID NO: 454 - protein, 589 aa, Arabidopsis thaliana
  misc_feature (100)..(509): Pfam Name: PTR2 Pfam Description: POT family
  misc_feature: Public GI ID no. 26451333
  misc_feature: Bit score of 1306.0 for HMM based on sequences of Figure 11
  misc_feature: Functional Homolog Of SEQ ID NO. 426
MDQKVRQFEVCTQDGSVDRHGNPAIRANTGKWLTAILILVNQGLATLAFFGVGVNLVLFLTRVMGQDNAEAANNVSKWTGTVYIFSLLGAFLSDSYWGRYKTCAIFQASFVAGLMMLSLSTGALLLEPSGCGVEDSPCKPHSTFKTVLFYLSVYLIALGYGGYQPNIATFGADQFDAEDSVEGHSKIAFFSYFYLALNLGSLFSNTVLGYFEDQGEWPLGFWASAGSAFAGLVLFLIGTPKYRHFTPRESPWSRFCQVLVAATRKAKIDVHHEELNLYDSETQYTGDKKILHTKGFRFLDRAAIVTPDDEAEKVESGSKYDPWRLCSVTQVEEVKCVLRLLPIWLCTILYSVVFTQMASLFVVQGAAMKTNIKNFRIPASSMSSFDILNVAFFIFAYRRFLDPLFARLNKTERNKGLTELQRMGIGLVIAIMAMISAGIVEIHRLKNKEPESATSISSSSTLSIFWQVPQYMLIGASEVFMYVGQLEFFNSQAPTGLKSFASALCMASISLGNYVSSLLVSIVMKISTTDDVHGWIPENLNKGHLERFYFLLAGLTAADFVVYLICAKWYKYIKSEASFSESVTEEEEV

SEQ ID NO: 455 - protein, 568 aa, Arabidopsis thaliana
  misc_feature (109)..(501): Pfam Name: PTR2 Pfam Description: POT family
  misc_feature: Public GI ID no. 2160144
  misc_feature: Bit score of 1035.6 for HMM based on sequences of Figure 11
  misc_feature: Functional Homolog Of SEQ ID NO. 426
MFKILTTKIQSFFCLNISGGTEDGSIDIYGNPPSKKKTGNWKACPFILGNECCERLAYYGIAKNLITYYTSELHESNVSAASDVMIWQGTCYITPLIGAVIADSYWGRYWTIASFSAIYFIGMALLTLSASLPVLKPAACAGVAAALCSPATTVQYAVFFTGLYLIALGTGGIKPCVSSFGADQFDDTDPRERVRKASFFNWFYFSINIGSFISSTLLVWVQENVGWGLGFLIPTVFMGVSIASFFIGTPLYRFQKPGGSPITRVCQVLVAAYRKLKLNLPEDISFLYETREKNSMIAGSRKIQHTDAAVISEYESKSGAFSNPWKLCTVTQVEEVKTLIRMFPIWASGIVYSVLYSQISTLFVQQGRSMNRIIRSFEIPPASFGVFDTLIVLISIPIYDRFLVPFVRRFTGIPKGLTDLQRMGIGLFLSVLSIAAAAIVETVRLQLAQDFVAMSIFWQIPQYILMGIAEVFFFIGRVEFFYDESPDAMRSVCSALALLNTAVGSYLSSLILTLVAYFTALGGKDGWVPDDLNKGHLDYFFWLLVSLGLVNIPVYALICVKHTKKKAL

SEQ ID NO: 456 - protein, 590 aa, Arabidopsis thaliana
  misc_feature (124)..(523): Pfam Name: PTR2 Pfam Description: POT family
  misc_feature: Public GI ID no. 30696666
  misc_feature: Bit score of 1070.9 for HMM based on sequences of Figure 11
  misc_feature: Functional Homolog Of SEQ ID NO. 426
MVNSNEEDERRILDVEESLLTQEEVNNHLTGLSSTAEDGSIDIYGNPPSKKKTGNWKACPFILGNECCERLAYYGIAKNLITYYTSELHESNVSAASDVMIWQGTCYITPLIGAVIADSYWGRYWTIASFSAIYFIGMALLTLSASLPVLKPAACAGVAAALCSPATTVQYAVFFTGLYLIALGTGGIKPCVSSFGADQFDDTDPRERVRKASFFNWFYFSINIGSFISSTLLVWVQENVGWGLGFLIPTVFMGVSIASFFIGTPLYRFQKPGGSPITRVCQVLVAAYRKLKLNLPEDISFLYETREKNSMIAGSRKIQHTDGYKFLDKAAVISEYESKSGAFSNPWKLCTVTQVEEVKTLIRMFPIWASGIVYSVLYSQISTLFVQQGRSMNRIIRSFEIPPASFGVFDTLIVLISIPIYDRFLVPFVRRFTGIPKGLTDLQRMGIGLFLSVLSIAAAAIVETVRLQLAQDFVAMSIFWQIPQYILMGIAEVFFFIGRVEFFYDESPDAMRSVCSALALLNTAVGSYLSSLILTLVAYFTALGGKDGWVPDDLNKGHLDYFFWLLVSLGLVNIPVYALICVKHTKKKAL

SEQ ID NO: 457 - protein, 561 aa, Oryza sativa subsp. indica
  misc_feature (91)..(486): Pfam Name: PTR2 Pfam Description: POT family
  misc_feature: Public GI ID no. 125556922
  misc_feature: Bit score of 1005.3 for HMM based on sequences of Figure 11
  misc_feature: Functional Homolog Of SEQ ID NO. 426
MEATTTDGTTDHAGKPAVRSKSGTACPFILGNECCERLAYYGMSANLVNYMVDRLRQGNAGAAASVNNWSGTCYVMPLVGAFLADAYLGRYRTIAAFMALYIVGLALLTMSASVPGMKPPNCATISASSCGPSPGQSAAFFVALYLIALGTGGIKPCVSSFGADQFDDADPREHRSKASFFNWFYMSINVGALVASSVLVWVQMNVGWGWGFGIPAVAMAVAVASFLMGSSLYRHQKPGGSPLTRMLQVVVAAARKSRVALPADAAALLYEGDKLACGTRRLAHTEQFRWLDRAAVVTPTTDKDDDTGSRWRLCPVTQVEELKAVVRLLPVWASGIVMSAVYGQMSTMFVLQGNTLDPRMGATFKIPSASLSIFDTLAVLAWVPVYDRLIVPAARRFTGHPRGFTQLQRMGIGLLISVFSMVAAGVLEVVRLRVAAAHGMLDSTSYLPISIFWQVQYFIIGQIDFFYDQAPDDMRSTCTALSLTSSALGNYLSTLLVVIVTAASTRGGGLGWIPDNLNRGHLDYFFWLLAALSAVNFLVYLWIANWYRCKTITTTEAAAQT

SEQ ID NO: 458 - DNA, 1710 bp, Populus balsamifera subsp. trichocarpa
  misc_feature: Ceres Annot ID no. 1529287
  misc_feature: Encodes the peptide sequence at SEQ ID NO. 459
atggcagaaactgattacacaaacaatgggacggtggatatcgaaggaaatccagctaataagaagaaaactggaaactggaagtcttgccgctttattcttgggaatgaatgctgtgagaggttggcatactacgggatgagtacgaatctagtgaactatcttggggaccgtctcaaccagggaaatgttgctgcagcaaacaatgtcaccaattggtctggaacttgctatgtcacaccactgattggagcctttctagcagattcatatttgggaagatattggacaattgcgagttttgttatcatatatatcattggaatgacactcctaacattgtctgcttcggtcactggtctgaagccatcatgtgataaggattcttgccacccgaccacaggacaaactgcagcatgctttgtagcactttacatgatcgctcttggaactggaggaatcaagccatgtgtttcatcctttggcgcagatcaatttgatgaaactgatgagaccgagaggaaaaagaaaagctccttttttaattggttttacctttcaatcaatatcggcgcgcttgttgcgtcttctgttttggtctggatacaaatgaatgttggctggggatgggggtttggagtcccagcagttgccatggctgtagcggttgtgtttttcttcttaggaagcaagctataccgaattcaaaaacctggtgggagtcccattacaaggattgtccaggttatagttgcatccttcagaaagagtaatgttcaagttcctgctgataaatctcttctttacgagactgcagaggaggaaagtcaaatccaaggaagccgcaagcttgaacataccaacaaattcaagttcttcgataaggctgctgtgaaaacccaagatgacaatataaagggcttaacaagtccatggagactctgcacagtaactcaagttgaagagctcaagtccataatcaggttgctcccagtatgggcatctggaatagtcttctcaactgtgtacagtcaaatgaacaccatgttcgttttgcaaggaaataccatggaccaacacatgggtccacatttccagattccatcagcatcgctctccctctttgatacccttagcgtcatcttctgggctcctgtatacgatcgaatcattgtcccatatgcaaggaaatttacgggtcatgaacgaggctttactcagctccaacgcatgggcattggcctcgtcatatcaattgtgtccatgatcactgctggaatattggaggttgttcggctcaactttgtccaaaagaacaattactatgatcttaagtacatcccaatgtccattttctggcaagtaccgcagtactttctcattggatgtgcagaagtttttaccttcattggacagttggagtttttctacgaccaggcaccagatgctatgagaagtttgtgctcagctctttcgcttaccactgtcgcattaggaaattacttgagcactctgcttgtcaccattgttactaaaatcacaacgagaggtgggaagctcggttggattcctgataatatgaacaggggccatcttgattacttctactggctcttggcaattctcagcttcctgaacttcattttgtatctctggatttcaaaatggtttacctacaagaaagctacagggcatcctcaacgagactga

SEQ ID NO: 459 - protein, 569 aa, Populus balsamifera subsp. trichocarpa
  misc_feature (95)..(496): Pfam Name: PTR2 Pfam Description: POT family
  misc_feature: Ceres Annot ID no. 1529287
  misc_feature: Bit score of 1172.9 for HMM based on sequences of Figure 11
  misc_feature: Functional Homolog Of SEQ ID NO. 426
MAETDYTNNGTVDIEGNPANKKKTGNWKSCRFILGNECCERLAYYGMSTNLVNYLGDRLNQGNVAAANNVTNWSGTCYVTPLIGAFLADSYLGRYWTIASFVIIYIIGMTLLTLSASVTGLKPSCDKDSCHPTTGQTAACFVALYMIALGTGGIKPCVSSFGADQFDETDETERKKKSSFFNWFYLSINIGALVASSVLVWIQMNVGWGWGFGVPAVAMAVAVVFFFLGSKLYRIQKPGGSPITRIVQVIVASFRKSNVQVPADKSLLYETAEEESQIQGSRKLEHTNKFKFFDKAAVKTQDDNIKGLTSPWRLCTVTQVEELKSIIRLLPVWASGIVFSTVYSQMNTMFVLQGNTMDQHMGPHFQIPSASLSLFDTLSVIFWAPVYDRIIVPYARKFTGHERGFTQLQRMGIGLVISIVSMITAGILEVVRLNFVQKNNYYDLKYIPMSIFWQVPQYFLIGCAEVFTFIGQLEFFYDQAPDAMRSLCSALSLTTVALGNYLSTLLVTIVTKITTRGGKLGWIPDNMNRGHLDYFYWLLAILSFLNFILYLWISKWFTYKKATGHPQRD

SEQ ID NO: 460 - DNA, 2248 bp, Panicum virgatum
  misc_feature: Ceres Clone ID no. 1806748
  misc_feature: Encodes the peptide sequence at SEQ ID NO. 461
gtggcgctcctcccggtcccggccgcctcctctcctctcttccctcgtctcgcggtcgcgcccagagccgagaggaggaacaggcagggagattccacgcgcccggcagttacgataccgcgccgcagattccctcgtcgctgctcccccaagccctcccgcaccagcagcgccgccgccctccgccgccggctctccagtccagtccaggataggaggcctctgactctctgagctgcacaccatctgagcgacgccatgggagaggtcgcagacatgtacacccaagacgggaccgtcgacatgaagggcaacccggccgtgaagaagggcaccggcaactggcgcgcctgcccttacatcctcgcgaacgagtgctgcgagaggctggcgtactacagcatgagcaccaacctggtgaactacatgaagacccgcctcggccaggggaactccgtcgccgccaacaacgtcaccaactggagcggaacgtgctacatcacgccactcatcggcgcattcttggctgacgcctacatggggagatactggaccatcgccagcttcatgatcatctacatcattggcctgacgctgctgacaatggcgtcgtcggtgaaggggctggtgccgtcgtgcgacggcagcgggacgtgccacccgacggagtcgcagtcggcggcggtgttcgtggcgctgtacctgatcgcgctgggcacgggcggcatcaagccctgcgtgtcgtccttcggcgccgaccagtttgacgagaacgacgagcgggagaacaagagcaagagctccttcttcaactggttctacttctccatcaacatcggcgcgctggtggcgtcgacggtgctggtgtacgtgcagacgcacgtcggctggggctggggctttggcatccccgccgtggtgatggccatcgccgtcgtgagcttcttcgtcggcacgccgctgtaccggcaccagcgccccgggggcagcccggtcacgcgcatcgcgcaggtgctcgtcgcgtccgcgcgcaagtggagcgtggccgtgcccgccgacaaggcgcagctgcacgagacgctggacaaggagtccggcatcgagggcagccgcaagctcgagcacacggaccagttccgctgcctcgacaaggcggccgtcgtgacggcccctgacggcgcggcggcggcggcgccgagcccgtggcggctgtgcacggtgacccaggtggaggagcttaagagcgtggtccggctgctgcccatctgggcgaccgggatcgtgttcgcgacggtgtacgggcagatgagcaccatgttcgtgctgcagggcaacacgctggaccagcgcatggggccccggttcagcatcccctcggcgacgctctccatggtggacaccatcagcgtcatcatctgggtgcccatctacgaccgcctcatcgtgcccgcggcgcgctccgtcacgggccgcccgcgcgggttcacgcagctgcagcgcatgggcatcggcctcgtcatctccatcttctccatggtcgccgcgggcgtgctcgacgtcgtgcggctgcgcgccgtggcgcggcacgggctgtatggcgacaaggacacggtgcccatctccatcttctggcagatcccgcagtacttcatcatcgggtgcgccgaggtgttcaccttcgtggggcagctcgagttcttctacgaccaggctcccgacgccatgaggagcctgtgctcggcgctgtcgctcaccaccgtggcgctgggcaactacctgagcacggtgctggtgaccatcgtgacgcgcatcaccaccaggcacggcaggctcgggtggatcccggacaacctcaaccgcggccacctcgactacttcttctggctgctcgccgtgctcagcctcctcaacttcctcgtctacctgctcatcgccaggtggtacaaatacaagaagacggcggaatacccggacgccaccaaaggggagcgcaaccaggaacactgatcaagcggtggtgcagggctacatacaggctgactggacggagaagaagaagaaaaccaagtgattaaattctctctgttcggttggcttccgatttgttcgtgggagttcgcgtgtttaaacgtactagttcactgtaggtgacaggggtcgaatggattgcttagtatgtcatgtgtcagtaatatgcgcaatgcttgatctcaaatatcagtagtatctataaaataagttcagctcc

SEQ ID NO: 461 - protein, 582 aa, Panicum virgatum
  misc_feature (97)..(501): Pfam Name: PTR2 Pfam Description: POT family
  misc_feature: Ceres Clone ID no. 1806748
  misc_feature: Bit score of 1204.3 for HMM based on sequences of Figure 11
  misc_feature: Functional Homolog Of SEQ ID NO. 426
MGEVADMYTQDGTVDMKGNPAVKKGTGNWRACPYILANECCERLAYYSMSTNLVNYMKTRLGQGNSVAANNVTNWSGTCYITPLIGAFLADAYMGRYWTIASFMIIYIIGLTLLTMASSVKGLVPSCDGSGTCHPTESQSAAVFVALYLIALGTGGIKPCVSSFGADQFDENDERENKSKSSFFNWFYFSINIGALVASTVLVYVQTHVGWGWGFGIPAVVMAIAVVSFFVGTPLYRHQRPGGSPVTRIAQVLVASARKWSVAVPADKAQLHETLDKESGIEGSRKLEHTDQFRCLDKAAVVTAPDGAAAAAPSPWRLCTVTQVEELKSVVRLLPIWATGIVFATVYGQMSTMFVLQGNTLDQRMGPRFSIPSATLSMVDTISVIIWVPIYDRLIVPAARSVTGRPRGFTQLQRMGIGLVISIFSMVAAGVLDVVRLRAVARHGLYGDKDTVPISIFWQIPQYFIIGCAEVFTFVGQLEFFYDQAPDAMRSLCSALSLTTVALGNYLSTVLVTIVTRITTRHGRLGWIPDNLNRGHLDYFFWLLAVLSLLNFLVYLLIARWYKYKKTAEYPDATKGERNQEH

SEQ ID NO: 462 - DNA, 1794 bp, Glycine max
  misc_feature: Ceres Annot ID no. 8755095
  misc_feature: Encodes the peptide sequence at SEQ ID NO. 463
atggcctgcttagaagtcagcaaagagggaaagttcaaaggtgacacagaagaactcactcttgatggaagtgttgattggcatggtcgcccagcaatcagagccaaatctggcagatgggttgctggaaccatcgttctattgaaccaaggtctggcaaccttagcattctttggagtaggggttaacctagtgctgttcctgacaagagtgatggggcaaaataatgctgcagctgcaaacagtgtgagcaaatggactggcacagtttacatcttctctctagtgggtgctttcctaagtgattcttattggggaagatacaaaacttgtgccatctttcaggtcatctttgtaataggtctagtatcattgtccctttcatcatacctctccttgattaggcctaaaggttgtgggaatgaaacaattccatgtgggaagcattcaagcttggagatggggatgttctacctctcaatttatctcattgctttagggaatggagggtatcagccaaatattgccacatttggagctgaccagtttgacgaggagcactcaaaggagggttactcaaaggttgccttctttagctacttctacctggctttgaaccttggttcactcttctcaaacacaattctaggctattttgaagatgaaggactgtgggctctagggttctgggtgtctgcaggctctgcttttgccgcccttgtcttgtttcttcttgggaccccacgatatagacacttcaaacccagtggcaatcctctttcaaggttcagccaagtccttgttgctgcatcaaggaaatggagagctcaaatgacatcaaatggagaggacctatatgtcatggatgaaaatgaatctcccaccaatggcaacaggaagattctccacacaggcgggttcaaatttctggatagagcagcgtttatatctcccagagatctagaagaccaaaagagtggggtttacaacccctggcgtctctgccctataactcaagttgaagaagtgaagtgcatactaagacttcttccaatttggctctgcaccataatatactcagtggttttcacacaaatggcttctctttttgtggagcaaggggctgccatgaaaactacaatttccaatttcagaataccacctgcaagcatgtctagctttgacatcctcagtgtagctgtcttcattttcttctaccgtcgagtgattgatccacttgttggaagacttaaaaagaaaagttccaggggacttactgagcttcaaagaatgggaattgggcttgttatagctgtaatggctatggtttcagctggaatagttgaatgctacagacttaagtatgcaaactcaggatgcccccactgcagtggcacaagctctctaagcatcttctggcaaattcctcagtacgcacttattggagcttcagaggtttttatgtatgtaggccagttagagttcttcaatgctcagacgccagatggcttaaagagctttggaagtgccctttgcatgacgtccatctctcttgggaactacgtaagtagcatacttgttagtatagttatgaagatctccaccgaggatcacatgccagggtggatccctggaaacttaaatagaggtcacctagataggttttatttcctcttagctatcttgacatcaatagacttggtcctttatattgcatgtgcaaagtggttcaagagtatacagttggaagggaaatatgaagagaatgatatgcctggtagctttaaagtctaa

SEQ ID NO: 463 - protein, 597 aa, Glycine max
  misc_feature (108)..(516): Pfam Name: PTR2 Pfam Description: POT family
  misc_feature: Ceres Annot ID no. 8755095
  misc_feature: Bit score of 1276.1 for HMM based on sequences of Figure 11
  misc_feature: Functional Homolog Of SEQ ID NO. 426
MACLEVSKEGKFKGDTEELTLDGSVDWHGRPAIRAKSGRWVAGTIVLLNQGLATLAFFGVGVNLVLFLTRVMGQNNAAAANSVSKWTGTVYIFSLVGAFLSDSYWGRYKTCAIFQVIFVIGLVSLSLSSYLSLIRPKGCGNETIPCGKHSSLEMGMFYLSIYLIALGNGGYQPNIATFGADQFDEEHSKEGYSKVAFFSYFYLALNLGSLFSNTILGYFEDEGLWALGFWVSAGSAFAALVLFLLGTPRYRHFKPSGNPLSRFSQVLVAASRKWRAQMTSNGEDLYVMDENESPTNGNRKILHTGGFKFLDRAAFISPRDLEDQKSGVYNPWRLCPITQVEEVKCILRLLPIWLCTIIYSVVFTQMASLFVEQGAAMKTTISNFRIPPASMSSFDILSVAVFIFFYRRVIDPLVGRLKKKSSRGLTELQRMGIGLVIAVMAMVSAGIVECYRLKYANSGCPHCSGTSSLSIFWQIPQYALIGASEVFMYVGQLEFFNAQTPDGLKSFGSALCMTSISLGNYVSSILVSIVMKISTEDHMPGWIPGNLNRGHLDRFYFLLAILTSIDLVLYIACAKWFKSIQLEGKYEENDMPGSFKV

SEQ ID NO: 464 - protein, 592 aa, Vitis vinifera
  misc_feature (109)..(517): Pfam Name: PTR2 Pfam Description: POT family
  misc_feature: Public GI ID no. 147827175
  misc_feature: Bit score of 1308.0 for HMM based on sequences of Figure 11
  misc_feature: Functional Homolog Of SEQ ID NO. 426
  misc_feature (577)..(577): Xaa is any aa, unknown, or other
MGINLEVSKEVKFKAGEEACTLDGTVDCRGNPAIRSRSGKWFAGIIILLNQGLATLAFFGVGVNLVLFLTRVLQQNNADAANNVSKWTGTVYIFSLVGAFLSDSYWGRYKTCAIFQVIFVIGLVSLSLSSYIFLVKPEGCGNEDSPCPSHSSLEIGLFYLSIYLVALGNGGYQPNIATLGADQFDEEDPKEGHSKVAFFSYFYLALNLGSLFSNTILSYLEDEGMWALGFWVSAGSAFLALILFLGGTPRYRHFKPSGNPLSRFCQVMVAAMRKFRVEMPPSAEDLYEGDGKECSNNSIRRILHTDGFKFLDRAAFISSKDSDNQEQGFYNQWRLCPITQVEEVKCILRLIPIWLCTIIYSVVFTQMASLFVEQGAAMKTTVSNFRIPPASMSSFDILSVAAFIFLYRRVLDPLVGRIRKTDTKGLTELQRMGIGLIIAIIAMIAAGIVECYRLKYAQKDCTNCEGSSSLSIFWQVPQYAFIGASEVFMYVGQLEFFNAQTPDGLKSFGSALCMTSISLGNYVSSLLVTMVMKISTEDHMPGWIPGNLNKGHLDRFYFLLATLTALDLVVYVACAKXYKCIKMEBRANEYGV

SEQ ID NO: 465 - DNA, 2631 bp, Panicum virgatum
  misc_feature: Ceres Clone ID no. 1888865
  misc_feature: Encodes the peptide sequence at SEQ ID NO. 466
acctcgtccgcctcgttggctccgcaccgctgcatctctctagagacaaaggcaggccgcgtgctcccctgcgtagtccttcgagcaggtacgagcggcctcctcctccgtcttcttgattccgccatggcttctgcagcagtagaggggtggagattccggcggtttctgaatcttcttgtttctgtgctttatgagttatgagtatggttggtaatggcgtccgcttgctagtggccactatgctgaaaaattgggcgagcctttagtgttcagaactcgatgaccaacttctaggagttaggtctgcctcaaattcagatccccccactttgtttgtgtggattactgaagtggccaataatttgagcaatttgtccattttttccctcgactaacttgtgccaacaaaaaatgtttttttcttgaagaaatttgatgtctgtatttgagtcgttaaatcgtgtcccatttatattgtttctattctgatgcaaatccacgcctagtcacaatctctgaaatttcaaggcttcttgtgcacacttgctccgtttattgacatctaggactatcacactgaatcttcagtaacagtatcgttgtatgctcgcaggacaggaggcctctgattctctgagcttgtacaccatctgagcgacgccatgggagaggttgcagacatgtacacccaagacgggaccgtcgacatgaaggggaaccccgccgtgaagaagggcaccggcaactggcgcgcctgcccttacatcctcgcgaatgagtgctgcgagaggctggcgtactatggcatgagcaccaacctggtgaactacatgaagacccgcctcggccaggggaactctgtcgccgccaacaatgtcaccaactggagcggaacgtgctacatcacgccactcatcggcgcattcttggctgacgcctacatggggagatactggaccatcgcgagcttcatgatcatctacatcattggcctggcgctgctgacgatggcgtcgtcggtgaaggggctggtgccgtcgtgcgacagcagcgggacgtgccacccgacggagtcgcagtcggcggcagtgttcgtggcgctgtacctgatcgcgctgggcacgggcgggatcaagccctgcgtgtcatcctttggcgccgaccagttcgacgagaacgacgagcgggagcagaagagcaagagctccttcttcaactggttctacttctccatcaacatcggcgcgctggtggcgtcgacggtgctggtgtacgtgcagacgcacgtcggctggggctggggcttcggcatccccgccgtggtgatggccatcgccgtcgtcagcttcatcatcggcacgccgctgtaccggcaccagcgccccgggggcagcccgatcacgcgcatcgcgcaggtgctcgtcgcgtccgcgcgcaagtggagcgtggccgtgcccgccgacaaggcgcagctgcacgagacgctggacaaggagtccggcatcgagggcagccgcaagctagagcacacggaccagttcagctgcctcgacaaggcggccgtcgtgacggccaaggacggggcggcggtgagcccgtggcggctgtgcacggtgacgcaggtggaggagctcaagagcgtggtgcggctgctgcccatctgggcgaccgggatcgtgttcgcgacggtgtacgggcagatgagcaccatgttcgtgctgcagggcaacacgctggaccagcgcatgggccccaggttcagcatcccctcggcgacgttgtccatggtggacaccatcagcgtcatcatctgggtgcccatctacgaccgcgccatcgtgcccttcgtgcggtccgtgacggggcgcccgcgcgggttcacgcagctgcagcgcatgggcatcggcctcgtgatctccatcttctccatggtggcggcgggcgtgctcgacgtggtgcggctgcgcgccgtggcgcggcacggcctgtacggcgacaaggacacggtgcccatctccatcttctggcagatcccgcagtacttcatcatcgggtgcgcggaggtgttcaccttcgtggggcagctggagttcttctacgaccaggcgcccgacgccatgaggagcctgtgctcggcgctgtcgctcaccaccgtggcgctgggcaactacctgagcacggtgctggtgaccatcgtgacgcgcatcaccaccacgcacggcaggctcgggtggatcccggacaacctcaaccgcggccacctcgactacttcttctggctgctcgccgtgctcagcctcctcaacttcctcgtctacctggtcatcgccaagtggtacaagtacaagaagacggcggaatacccggacgccaaaggcggggagcacaactgatgaagcggtgcagggcagggctgcaggctgactgaacggacaaggcgaaaacgaagtgatttctctgtctgtgtggttggctctttcggtttgtttgtgagagttcgccgcgtgtttaaacgtagcagttcactgtaggtgacagggtcgaatgaattgtttagtatgtcatgtgtcagtaatacgcgcaatgcttgatcccaactatcagtatctataaaataagttcagctcc

SEQ ID NO: 466 - protein, 576 aa, Panicum virgatum
  misc_feature (97)..(498): Pfam Name: PTR2 Pfam Description: POT family
  misc_feature: Ceres Clone ID no. 1888865
  misc_feature: Bit score of 1202.6 for HMM based on sequences of Figure 11
  misc_feature: Functional Homolog Of SEQ ID NO. 426
MGEVADMYTQDGTVDMKGNPAVKKGTGNWRACPYILANECCERLAYYGMSTNLVNYMKTRLGQGNSVAANNVTNWSGTCYITPLIGAFLADAYMGRYWTIASFMIIYIIGLALLTMASSVKGLVPSCDSSGTCHPTESQSAAVFVALYLIALGTGGIKPCVSSFGADQFDENDEREQKSKSSFFNWFYFSINIGALVASTVLVYVQTHVGWGWGFGIPAVVMAIAVVSFIIGTPLYRHQRPGGSPITRIAQVLVASARKWSVAVPADKAQLHETLDKESGIEGSRKLEHTDQFSCLDKAAVVTAKDGAAVSPWRLCTVTQVEELKSVVRLLPIWATGIVFATVYGQMSTMFVLQGNTLDQRMGPRFSIPSATLSMVDTISVIIWVPIYDRAIVPFVRSVTGRPRGFTQLQRMGIGLVISIFSMVAAGVLDVVRLRAVARHGLYGDKDTVPISIFWQIPQYFIIGCAEVFTFVGQLEFFYDQAPDAMRSLCSALSLTTVALGNYLSTVLVTIVTRITTTHGRLGWIPDNLNRGHLDYFFWLLAVLSLLNFLVYLVIAKWYKYKKTAEYPDAKGGEHN

SEQ ID NO: 467 - protein, 569 aa, Vitis vinifera
  misc_feature (96)..(498): Pfam Name: PTR2 Pfam Description: POT family
  misc_feature: Public GI ID no. 157337163
  misc_feature: Bit score of 1128.1 for HMM based on sequences of Figure 11
  misc_feature: Functional Homolog Of SEQ ID NO. 426
MAEEDNYTKDGTINYQGNPANKKKTGTWTACPYILGNEFCERLAYYGMSSNLVLYFKYKLHQDSATASKNVLNWSGTCYLTPFIGAFLADAYLGRYWTIASFSIIYVIGMTLLTVTASVPGLKPNCSPSGVCDPTETQTAVCFLALYLVALGTGGIKPCVSSYGADQFDDTDEHEKTHKSSFFNWFYLSINVGALIAGSILVWIQENIGWGVGFGIPAAAMAIAVVSFFSGTRLYRNQKPGGSPLTRMSQVVVASLKKYRVQVPADKSLLYEIADGESGIQGSRKLDHTKDLSFFDKAAVEIQSDHIKDSPDPWKICTVTQVEELKAIIRLLPVWATGIIFSAVYSQMGSLFVVQGESMDPHMGRHFEIPSASLSIFDTISVIFWVPIYDRIIVPVARKFTGHSNGITQLQRMGIGLFISIFAMLSAGILEVVRLGIVKRHNYYDHDRIPLSIFYQVPQYFIIGCAEVFTFIGQLEFFYEQAPDAMRSFCSALSLATVALGNYLSSLLVTIVTDVSTRGGKLGWIPDNLNRGHLHYFFFLLAILSVLNLVAFLFVAKWYTYKRAVGTLR

SEQ ID NO: 468 - protein, 580 aa, Oryza sativa subsp. japonica
  misc_feature (98)..(500): Pfam Name: PTR2 Pfam Description: POT family
  misc_feature: Public GI ID no. 115434472
  misc_feature: Bit score of 1204.4 for HMM based on sequences of Figure 11
  misc_feature: Functional Homolog Of SEQ ID NO. 426
MGEVAEDIYTQDGTVDVKGNPATKKNTGNWRACPYILANECCERLAYYGMSTNLVNYMKTRLGQESAIAANNVTNWSGTCYITPLLGAFLADAYMGRFWTIASFMIIYILGLALLTMASSVKGLVPACDGGACHPTEAQTGVVFLALYLIALGTGGIKPCVSSFGADQFDENDEGEKRSKSSFFNWFYFSINIGALVASSVLVYVQTHVGWGWGFGIPAVVMAVAVASFFVGTPLYRHQRPGGSPLTRIAQVLVASARKWGVEVPADGSRLHETLDRESGIEGSRKLEHTGQFACLDRAAVETPEDRSAANASAWRLCTVTQVEELKSVVRLLPIWASGIVFATVYGQMSTMFVLQGNTLDASMGPHFSIPAASLSIFDTLSVIVWVPVYDRLIVPAVRAVTGRPRGFTQLQRMGIGLVISVFSMLAAGVLDVVRLRAIARHGLYGDKDVVPISIFWQVPQYFIIGAAEVFTFVGQLEFFYDQAPDAMRSMCSALSLTTVALGNYLSTLLVTIVTHVTTRNGAVGWIPDNLNRGHLDYFFWLLAVLSLINFGVYLVIASWYTYKKTADSPDDKAEHAGAN

SEQ ID NO: 469 - DNA, 1833 bp, Oryza sativa
  misc_feature: Ceres Annot ID no. 6252512
  misc_feature: Encodes the peptide sequence at SEQ ID NO. 470
atgtctggcaacgacggagacatgaagatgagggtgatcgtcgtggaaggcgatgagacgagtaacgccccgaaggatgtatgctgcgagtacaccctcgatggctccgtggatatcaagggctcaccggcggtgaagggcaagtccggcggatggctcgccggcggccttattcttctgaaccagggtctggcaaccctggcgttcttcggggtaaacgtgaacctggtgttgttcctgacgagggtgctgcagcagagcaacggcgacgccgccaacaacgtgagcaaatggaccggcacggtttacatgttctccctcatcggcgccttcctcagcgactcctactggggccgctacaagacctgcgccatattccaggccatctttgtccttggcctcgcgctgctgtccctgtcgtcgcggctgtacctgatcaggccggtcgggtgcggcacggagcacgtgccctgcgagccgcactccggcgcggagctggggatcttctacatcgcgctgtacatgatcgcgttcggcaacggcgggtaccagcccaacgtcgccaccttcggcgccgaccagttcgacggcgaggacccggccgagtcgcactccaaggtctccttcttcagctacttctacctggcgctcaacctcggctcgctcttctccaacaccttcctcagcttcctcgaggacgagggcaactgggcgctcggcttctgggtctccaccgccgccgcggccaccgcgctgctgctgttcctcggcggcacgctccgctaccggtacatccgccccagcggcaacccggttggcaggatcttccaggtcgcgttcgccgcgtgcaggaactggaaggccggcgagtcgccgggcgccgtgacactctacgagagcgacgagaaggcggattccggtgggaggaagctcctgcacacggaaggtttcaggttcttggaccgtgcggcggtggtgggcgctaacccgaagcttggcacgtgcacccaaccgcgtgacccctggaagctgtgcacggtgacgcaggtggaggaggtgaagagcatcctgcggctcctccccatctggctctgcaccatcctctattcggtcgtgttcacgcagatggcgtcgctgttcgtcgtgcagggcgccgcgatgcgccgcaccacccggttcccgggcttctccgtcccgccctccagcatgtcggccttcgacatcctcaccgtcgccaccaccatcttcctgtaccgccgggccgtctgcccgctcgtgtcgcggctcacgggccgccacaccggcccaaccgagctgcagaggatgggcctcggcctggtgctcggcgcgatggccatggccaccgccggcacggtcgagcacttcaggaaggccggcgccaccacggcgatgagcagcgacctgcacatcatgtggcaggtgccgcagtacgcgctgatcggcgtgtcggaggtgatgatgtacgtcggccagctcgagttcttcaacggggagatgcccgacgcgctcaagagcttcgggagcgcgctctgcatgatgtccatgtcgctcggcaactacttcagcgacgtcatcgtgagcgcggtgaccaaggccaccgccgtgcgcggccgccccggctggatccccgccgaccttaacgagggccacctcgacaagttcttcttcctgctcgccgtgctggccgtcgcggacttcgccgtgtacctcgtgtgcgcgagccggtacaggagtggcacggtggacgtcgaccggagcgacggggaggaggaggatggcgtggccggcaggcagatggcggcaacggtgtaa

SEQ ID NO: 470 - protein, 610 aa, Oryza sativa
  misc_feature (120)..(522): Pfam Name: PTR2 Pfam Description: POT family
  misc_feature: Ceres Annot ID no. 6252512
  misc_feature: Bit score of 1214.3 for HMM based on sequences of Figure 11
  misc_feature: Functional Homolog Of SEQ ID NO. 426
MSGNDGDMKMRVIVVEGDETSNAPKDVCCEYTLDGSVDIKGSPAVKGKSGGWLAGGLILLNQGLATLAFFGVNVNLVLFLTRVLQQSNGDAANNVSKWTGTVYMFSLIGAFLSDSYWGRYKTCAIFQAIFVLGLALLSLSSRLYLIRPVGCGTEHVPCEPHSGAELGIFYIALYMIAFGNGGYQPNVATFGADQFDGEDPAESHSKVSFFSYFYLALNLGSLFSNTFLSFLEDEGNWALGFWVSTAAAATALLLFLGGTLRYRYIRPSGNPVGRIFQVAFAACRNWKAGESPGAVTLYESDEKADSGGRKLLHTEGFRFLDRAAVVGANPKLGTCTQPRDPWKLCTVTQVEEVKSILRLLPIWLCTILYSVVFTQMASLFVVQGAAMRRTTRFPGFSVPPSSMSAFDILTVATTIFLYRRAVCPLVSRLTGRHTGPTELQRMGLGLVLGAMAMATAGTVEHFRKAGATTAMSSDLHIMWQVPQYALIGVSEVMMYVGQLEFFNGEMPDALKSFGSALCMMSMSLGNYFSDVIVSAVTKATAVRGRPGWIPADLNEGHLDKFFFLLAVLAVADFAVYLVCASRYRSGTVDVDRSDGEEEDGVAGRQMAATV

SEQ ID NO: 471 - DNA, 1770 bp, Medicago truncatula
  misc_feature: Ceres Annot ID no. 1569074
  misc_feature: Encodes the peptide sequence at SEQ ID NO. 472
atggaaggaaatgagaattacagagaagaggttgttatggaagaaagtggcagagcgaatgagaataaaaaaggaggaaccaaagttgcaaccctcttgttagtgaatcaagcactggctactttagctttctttggagttggagtgaacttggttctgttcctaactagagttcttggtcaagacaatgccgaagctgctaataatgtgagcaagtggacaggaaccgtttacatgttctcattggttggagcatttctcagtgactcttattggggtcgatacttaacctgcacaatctttcaacttttctttgttctcggattggcactgtcatgtttgtcatcatggcgttttttgatcaacccaagtggatgtggtaatggccatattccttgtaagccatcatcaattggagttagcattttctacttttctatatatcttgttgcatttggttatggaggacaccaaccaaccttagcaacctttggagctgaccaatatgatgagaggaatccaaaagagaggagtttaaaagtagctttcttctgttatttttacttttccctcaacgttggatctttgttctccaatactgtattggtctattatgaggacacggggaagtggacaatgggtttctttatatcattgatctctgctatcatagcccttttgacatttttatcaggatctcctaaatatagatacttgaagccatcaggaaaccctgtcgtaagggttgctcaggtttttacagctgctgctaggaaatgggatgttgctccagccaaggcagacaaactttttgaggttctgggttctagatctgccatcaaaggttgtagaaagattctgcacagtgatgattttcgattgatggacaaagctgcaaccattacaaagaatgatgatgagcagattggaaacaatccatggaagctttgcacagtgactcaagttgaggaaacaaaatgcgtgttaagaatgcttccaatttggctatgcaccatttgttactctgttgtatttacacaaatggcatcactatttgttgagcaaggggatgtgatgaactctaacatcggagaatttcatttgccagcagccagcatgtctgtgtttgacatctgtagtgtgctagtatgcactgtaatatatcgcacaatccttgttccgttagtaggaagattgattggtaatacaaggggaattagtgaacttgaaagaatgggaattgggttaataattgcaatgttgtcaatggttgcatcaggtatgacagagatggtaaggctgagaaatataattcctgggcagaaaagaagttcaatgagtatattctatcaaattccacagtatgttctgattggtgcttcagaggttttcatgtatgtgggtcaattggagttctttaatggtcaagcaccagatggaataaaaagttttgggagttcactttgtatggcttcaatttctcttggaaactatgtgagtagcatgcttgttcacgtggtcatgaaaatcactgcaagagggaatgacaaaggttggattccagagaacctaaacaaagggcacatggataggtttttctttcttctagcagggctagttgtttttgattttgtgatttacttgttctgtgctaagtggtacaagagtatcaatgttcaaggtgaccaagaggagttggatgatgatgatgctcaagttattataattaagtcggcatccaaagaccaacctttaacaccacaagaataa

SEQ ID NO: 472 - protein, 589 aa, Medicago truncatula
  misc_feature (95)..(493): Pfam Name: PTR2 Pfam Description: POT family
  misc_feature: Ceres Annot ID no. 1569074
  misc_feature: Bit score of 1140.5 for HMM based on sequences of Figure 11
  misc_feature: Functional Homolog Of SEQ ID NO. 426
MEGNENYREEVVMEESGRANENKKGGTKVATLLLVNQALATLAFFGVGVNLVLFLTRVLGQDNAEAANNVSKWTGTVYMFSLVGAFLSDSYWGRYLTCTIFQLFFVLGLALSCLSSWRFLINPSGCGNGHIPCKPSSIGVSIFYFSIYLVAFGYGGHQPTLATFGADQYDERNPKERSLKVAFFCYFYFSLNVGSLFSNTVLVYYEDTGKWTMGFFISLISAIIALLTFLSGSPKYRYLKPSGNPVVRVAQVFTAAARKWDVAPAKADKLFEVLGSRSAIKGCRKILHSDDFRLMDKAATITKNDDEQIGNNPWKLCTVTQVEETKCVLRMLPIWLCTICYSVVFTQMASLFVEQGDVMNSNIGEFHLPAASMSVFDICSVLVCTVIYRTILVPLVGRLIGNTRGISELERMGIGLIIAMLSMVASGMTEMVRLRNIIPGQKRSSMSIFYQIPQYVLIGASEVFMYVGQLEFFNGQAPDGIKSFGSSLCMASISLGNYVSSMLVHVVMKITARGNDKGWIPENLNKGHMDRFFFLLAGLVVFDFVIYLFCAKWYKSINVQGDQEELDDDDAQVIIIKSASKDQPLTPQE

SEQ ID NO: 473 - DNA, 1647 bp, Populus balsamifera subsp. trichocarpa
  misc_feature: Ceres Annot ID no. 1475845
  misc_feature: Encodes the peptide sequence at SEQ ID NO. 474
atggcagaagatggctctaccaaagatggagcagcagatttccgaaatgaatgctgcgaaaggttggcctactatggaatcaacacaaatctagttaattacctcaaatttcaactaaaccagagcaatgttgtggcggtcaataacgtcaccaattggtcaggaacatgctatgtcatgccattgcttggagcttttcttgctgatgcctacttgggaagatattggacaattgctagtttctctataatctatgtctttggaatgacattgttgacattgtcagcatcgatccatggactaaaaccatcttgcgacagaacgaatgtttgccatacaacagggttgcagacatcagttttctttctaggcctataccttatagccctggggactggagggatcaagccttgtgtctcttcctttggtgcggatcaattcgatgactctgacgaggatgagaagaaaaggaagagttccttcttcaattggttctatttttcaatcaatatcggcgctcttattgctgcttctgtgcttgtttggatacaaaccaatgtaggctggggctggggctttggcatcccagcagtggcaatggcaattgctgttgtgagtttcttttcaggtacacggttatacaggaaccagagacttggagggagtcccttaacacgaatgtgccaagtgctagttgcatccttcaggaaattccgtgtcgaagtgcctaatgacaagtctcttctgtttgagacagcagaccatgaatctgctgtcatgggaagccgcaaacttgaccacacagatcagttaagtttctttgacaaggcagcagtggagactccatcagaccgtctaaaagggtccgcgaatcagtggaaactgtgcaccgtgactcaggttgaagagctcaagtccatcattcggttgcttcctgtatgggcaactggcataatattttctgctgtatacagtcaaatgggaaccttatttgtcctgcagggaaacacaatggaccttcgcatgggcaaatccttcgaaatcccttctgcttcactctccctctttgacacaattagtgtaatcttctgggtaccgatttacgaccgtgccatcgtgccctttgcaagaagatttactggacacaagaatggattcacacagcttcaaagaattgcaattggccttgtaatttccatctttgccatgttggttgctgggactctagagcttgtgaggctccgcgaggtcagaaaacataactactatgaactaaagcacataccaatgtccatattttggcaggtccctcagtatttcattataggatgtgcagaagttttcacatttatcgggcaattagagttcttttatgagcaggcacccgatgccatgaggagcctttgctcagctctctcactcacaaccgctgcacttgggaactacttgagcacattcctagttaatattgtcacggatatgagcaccaggcatggtaagcctggttggataccggacaatttgaatcatggccatcttcattattttttctggctcttggcagtgttgagtgtgctcaacttgggggtctatcttttggttgccagatggtacacttacaagaaagctgtggtgtccagtgattga

SEQ ID NO: 474 - protein, 548 aa, Populus balsamifera subsp. trichocarpa
  misc_feature (75)..(477): Pfam Name: PTR2 Pfam Description: POT family
  misc_feature: Ceres Annot ID no. 1475845
  misc_feature: Bit score of 1063.0 for HMM based on sequences of Figure 11
  misc_feature: Functional Homolog Of SEQ ID NO. 426
MAEDGSTKDGAADFRNECCERLAYYGINTNLVNYLKFQLNQSNVVAVNNVTNWSGTCYVMPLLGAFLADAYLGRYWTIASFSIIYVFGMTLLTLSASIHGLKPSCDRTNVCHTTGLQTSVFFLGLYLIALGTGGIKPCVSSFGADQFDDSDEDEKKRKSSFFNWFYFSINIGALIAASVLVWIQTNVGWGWGFGIPAVAMAIAVVSFFSGTRLYRNQRLGGSPLTRMCQVLVASFRKFRVEVPNDKSLLFETADHESAVMGSRKLDHTDQLSFFDKAAVETPSDRLKGSANQWKLCTVTQVEELKSIIRLLPVWATGIIFSAVYSQMGTLFVLQGNTMDLRMGKSFEIPSASLSLFDTISVIFWVPIYDRAIVPFARRFTGHKNGFTQLQRIAIGLVISIFAMLVAGTLELVRLREVRKHNYYELKHIPMSIFWQVPQYFIIGCAEVFTFIGQLEFFYEQAPDAMRSLCSALSLTTAALGNYLSTFLVNIVTDMSTRHGKPGWIPDNLNHGHLHYFFWLLAVLSVLNLGVYLLVARWYTYKKAVVSSD

SEQ ID NO: 475 - DNA, 1929 bp, Populus balsamifera subsp. trichocarpa
  misc_feature: Ceres Annot ID no. 1501483
  misc_feature: Encodes the peptide sequence at SEQ ID NO. 476
atggaaggcatgaccaaggttgtggcaaacactcttctaaggagacctctcttccctgttccattttccacccatattttcttctttaatggcaacaacaaaagaaaatattctattgctgctatggattcagacccttccaccgattatgtgacaggagaaagtgtcatctctagagaaaatgtagctgtgaacagaatcagaactgaggaagaacacgatattgctagcaataagcgctccattacttggaagagctctggagggtggaaagctgcaagcatcttgctagcaaatcaatgcctggctacactagctttctttggagttggtgtgaatttggttctgttcttaacaagagttcttggtcaaagtaatgctgatgctgccaatagtgtcagcaagtggactggcacagtttatctgtgctcactcataggagctttcctcagtgattcatactggggcagatacttgacctgtgcagtctttcagttaatattcgtttcggggttggcgctcgtatcggtatcatcttgttatttcttgatcaaaccagatggatgtggtgatggagaattagcctgtgagccaacatcgtcggtgggagtggctattttttacttggctatatatttagttgcctttggatatggtgggcatcaaccttctttagccacatttggagcagaccaatttgacgagtcgaaaccgaaagaaaaaaattacaaggcagcttacttttgctatttctattttgcactcaactttggatctctattctcaaacactattttggtgtattttgaggatcatggaaaatggacactaggtttcctggtgtcattaggctctgcagttttagccttggtatcgttcttgtttgggacacctggttaccagtatgtgaaaccttgcggcaaccctttgccgcgagttgctcaggtgtttgtggctgcagttaagaaatgggatgttatcccggcgaaagctgatgaactttatgaagtggaaggaccagaatctgctatcaaagggagcagaaagattcttcatagtgatgattttgagtttttggacaaggcagcaacagtaacagaggatgatctaagtcaccaaaagaatccatggaggctttgcacaataagtcaagtagaggaagctaaatgtgttcttaaaatgttacctatttggctatgcactataatttactctgttgttttcacacaaatggcctccctctttgttgagcaaggagatgtcatgaactcctatgctggaaagtttcacctaccagcagctagcatgtctgcctttgatatctgcagtgtccttgtttgcactgggatttatcgccaaatcctcgtgccattagctggaaggttaagtggtaataccaaggggttaacggagcttcagagaatgggaatcggactcatcattgggatgctagcaatgttcgcagcaggggctactgagattgaaaggctcaagcatgttactgaagggaaaaaagttagctcactaagcatattttggcaaattccacaatacgttcttgtcggtgcatctgaggttttcatgtatgtaggccagttggagttctttaacgggcaagcaccagacgggattaagagttttggaagctcactttgcatggcttcaatctcccttggcaactatgtcagcagcatgctagtcagcatggtgatgaagattacagctaaaggtgacaagcctggatggatcccagatgacttgaacacaggccacatggacaggttctacttcctgattgcagtcttaacagcctttgattttgtgatttacttgttctgtgccaactggtacacgcctatcaacattgatgacagccacggaggaattgggatggaaaagcaagaagatgatgcgcttgcaagagtttaa

SEQ ID NO: 476 - protein, 601 aa, Populus balsamifera subsp. trichocarpa
  misc_feature (117)..(515): Pfam Name: PTR2 Pfam Description: POT family
  misc_feature: Ceres Annot ID no. 1501483
  misc_feature: Bit score of 1181.1 for HMM based on sequences of Figure 11
  misc_feature: Functional Homolog Of SEQ ID NO. 426
MDSDPSTDYVTGESVISRENVAVNRIRTEEEHDIASNKRSITWKSSGGWKAASILLANQCLATLAFFGVGVNLVLFLTRVLGQSNADAANSVSKWTGTVYLCSLIGAFLSDSYWGRYLTCAVFQLIFVSGLALVSVSSCYFLIKPDGCGDGELACEPTSSVGVAIFYLAIYLVAFGYGGHQPSLATFGADQFDESKPKEKNYKAAYFCYFYFALNFGSLFSNTILVYFEDHGKWTLGFLVSLGSAVLALVSFLFGTPGYQYVKPCGNPLPRVAQVFVAAVKKWDVIPAKADELYEVEGPESAIKGSRKILHSDDFEFLDKAATVTEDDLSHQKNPWRLCTISQVEEAKCVLKMLPIWLCTIIYSVVFTQMASLFVEQGDVMNSYAGKFHLPAASMSAFDICSVLVCTGIYRQILVPLAGRLSGNTKGLTELQRMGIGLIIGMLAMFAAGATEIERLKHVTEGKKVSSLSIFWQIPQYVLVGASEVFMYVGQLEFFNGQAPDGIKSFGSSLCMASISLGNYVSSMLVSMVMKITAKGDKPGWIPDDLNTGHMDRFYFLIAVLTAFDFVIYLFCANWYTPINIDDSHGGIGMEKQEDDALARV

SEQ ID NO: 477 - DNA, 1821 bp, Populus balsamifera subsp. trichocarpa
  misc_feature: Ceres Annot ID no. 8755079
  misc_feature: Encodes the peptide sequence at SEQ ID NO. 478
atggattcgttctcttccaccaacgctgtgctaaagaagcaggtgacaggagaaagtagtatcatctctagggaaaatgtagctgtgaagagaatcagaactgaggaagaacaggagattgctaacagaaagccttcccttatttggaagagaactggagggtggacagctgcaagcatcttgctagcaaatcaatgcctggctacactagctttctttggagttggtgtgaatttggttctattcttaacaagagttcttggtcaaagtaatgctgatgctgccaataatgtcagcaagtggactggcacagtttatctgtgctcactcgtaggagctttcctcagtgattcatactggggtagatacttgacctgtgcaatctttcagctaatattcgtctcgggattggtgctcgtatcggtatcatcttggtttttcttgatcaaaccagatggatgtggtgatggaaaattaacctgtgtgccggcaacatcgatgggacaagttgttttctacttggctatatacttagtagcctttggatatggtggacatcaaccttccatagcgacatttggagcagatcaatttgacgagtcgaaaccgaaagaaagaaattccaaggcagctttcttttgctatttctattttgcactcaactttggatctttattctcaaacacccttttggtgtactttgaggatcatggcagatggacactaggcttcctgctatcattaggttctgcagtcgtagccttggtatcattcttgtttggggcacctggttacaagtacgtaaaaccttgcggcaaccctttgccgcgagttgctcaggtgtttgtggctgcagctaggaaatgggatgttatcccggtgaaagctgatgaactgtatgaactagaaggaccagaatctgctatcaaagggagcaggaagatttttcacagtgaagaatttgagtttttggacaaggcagcaacaatgacagaggatgatttgagtcaccaaaagaatccatggaggctttgcacaataactcaagtagaggaagccaaatgtgttcttaaaatgttacctatttggttatgcactattatttactctgttgtcttcactcagatggcatccctctttgttgagcaaggagatgtcatgaattcctatattggaaagtttcacctcccagctgctagcatgtctgccttcgatatctgcagtgtccttgtttgcactggaatttatcgtcaaatcctcgtgccattagctggaaggttaagtggtaatcctaaggggttaactgagcttcagaggatgggaattggactcgtcattggaatgctagcaatgcttgcagcgggtgctactgagattgaaaggctcaagaatgttattgaagggcacaaagtcagctctttaagcatattttggcaaattccacaatatgttcttgttggtgcatctgaggttttcatgtatataggtcaattggagttctttaacgggcaagcaccagacgggattaagagttttggaagctcactttgcatggcttcaatctctcttggcaactatgccagtagcatgctagttaatatggtgatgaagattacaactaaaggtgacaagcctggatggatcccagatgacttgaacacaggacacatggacaggttttacttcctgattgcagtgttaacagcctttgatttcgtgatttacttgttctgtgccaagtggtacaagcctatcaacattgatgacagtcagggaattgagatggaaaagcaagaagatgatgtgcttgcaaaagtttaa

SEQ ID NO: 478 - protein, 606 aa, Populus balsamifera subsp. trichocarpa
  misc_feature (123)..(521): Pfam Name: PTR2 Pfam Description: POT family
  misc_feature: Ceres Annot ID no. 8755079
  misc_feature: Bit score of 1186.9 for HMM based on sequences of Figure 11
  misc_feature: Functional Homolog Of SEQ ID NO. 426
MDSFSSTNAVLKKQVTGESSIISRENVAVKRIRTEEEQEIANRKPSLIWKRTGGWTAASILLANQCLATLAFFGVGVNLVLFLTRVLGQSNADAANNVSKWTGTVYLCSLVGAFLSDSYWGRYLTCAIFQLIFVSGLVLVSVSSWFFLIKPDGCGDGKLTCVPATSMGQVVFYLAIYLVAFGYGGHQPSIATFGADQFDESKPKERNSKAAFFCYFYFALNFGSLFSNTLLVYFEDHGRWTLGFLLSLGSAVVALVSFLFGAPGYKYVKPCGNPLPRVAQVFVAAARKWDVIPVKADELYELEGPESAIKGSRKIFHSEEFEFLDKAATMTEDDLSHQKNPWRLCTITQVEEAKCVLKMLPIWLCTIIYSVVFTQMASLFVEQGDVMNSYIGKFHLPAASMSAFDICSVLVCTGIYRQILVPLAGRLSGNPKGLTELQRMGIGLVIGMLAMLAAGATEIERLKNVIEGHKVSSLSIFWQIPQYVLVGASEVFMYIGQLEFFNGQAPDGIKSFGSSLCMASISLGNYASSMLVNMVMKITTKGDKPGWIPDDLNTGHMDRFYFLIAVLTAFDFVIYLFCAKWYKPINIDDSQGIEMEKQEDDVLAKV

SEQ ID NO: 479 - protein, 572 aa, Oryza sativa subsp. japonica
  misc_feature (93)..(497): Pfam Name: PTR2 Pfam Description: POT family
  misc_feature: Public GI ID no. 115470147
  misc_feature: Bit score of 1062.2 for HMM based on sequences of Figure 11
  misc_feature: Functional Homolog Of SEQ ID NO. 426
MEATTTDGTTDHAGKPAVRSKSGTWRACPFILGNECCERLAYYGMSANLVNYMVDRLRQGNAGAAASVNNWSGTCYVMPLVGAFLADAYLGRYRTIAAFMALYIVGLALLTMSASVPGMKPPNCATISASSCGPSPGQSAAFFVALYLIALGTGGIKPCVSSFGADQFDDADPREHRSKASFFNWFYMSINVGALVASSVLVWVQMNVGWGWGFGIPAVAMAVAVASFLMGSSLYRHQKPGGSPLTRMLQVVVAAARKSRVALPADAAALLYEGDKLACGTRRLAHTEQFRWLDRAAVVTPTTDKDDDTGSRWRLCPVTQVEELKAVVRLLPVWASGIVMSAVYGQMSTMFVLQGNTLDPRMGATFKIPSASLSIFDTLAVLAWVPVYDRLIVPAARRFTGHPRGFTQLQRMGIGLLISVFSMVAAGVLEVVRLRVAAAHGMLDSTSYLPISIFWQVQYFIIGAAEVFAFIGQIDFFYDQAPDDMRSTCTALSLTSSALGNYLSTLLVVIVTAASTRGGGLGWIPDNLNRGHLDYFFWLLAALSAVNFLVYLWIANWYRCKTITTTEAAAQT

SEQ ID NO: 480 - protein, 570 aa, Arabidopsis thaliana
  misc_feature (97)..(499): Pfam Name: PTR2 Pfam Description: POT family
  misc_feature: Public GI ID no. 15240905
  misc_feature: Bit score of 1099.4 for HMM based on sequences of Figure 11
  misc_feature: Functional Homolog Of SEQ ID NO. 426
MEDDKDIYTKDGTLDIHKKPANKNKTGTWKACRFILGTECCERLAYYGMSTNLINYLEKQMNMENVSASKSVSNWSGTCYATPLIGAFIADAYLGRYWTIASFVVIYIAGMTLLTISASVPGLTPTCSGETCHATAGQTAITFIALYLIALGTGGIKPCVSSFGADQFDDTDEKEKESKSSFFNWFYFVINVGAMIASSVLVWIQMNVGWGWGLGVPTVAMAIAVVFFFAGSNFYRLQKPGGSPLTRMLQVIVASCRKSKVKIPEDESLLYENQDAESSIIGSRKLEHTKILTFFDKAAVETESDNKGAAKSSSWKLCTVTQVEELKALIRLLPIWATGIVFASVYSQMGTVFVLQGNTLDQHMGPNFKIPSASLSLFDTLSVLFWAPVYDKLIVPFARKYTGHERGFTQLQRIGIGLVISIFSMVSAGILEVARLNYVQTHNLYNEETIPMTIFWQVPQYFLVGCAEVFTFIGQLEFFYDQAPDAMRSLCSALSLTAIAFGNYLSTFLVTLVTKVTRSGGRPGWIAKNLNNGHLDYFFWLLAGLSFLNFLVYLWIAKWYTYKKTTGHAL

SEQ ID NO: 481 - DNA, 1809 bp, Populus balsamifera subsp. trichocarpa
  misc_feature: Ceres Annot ID no. 8755085
  misc_feature: Encodes the peptide sequence at SEQ ID NO. 482
atggattcagacccttccaccgattatcaggtgacaggagaaagtgtcatctctagagaaaatgtagctgtgaacagaatcagaactgaggaagaacacgatattgctagcaataagcgctccattacttggaagagctctggagggtggaaagctgcaagcatcttgctagcaaatcaatgcctggctacactagctttctttggagttggtgtgaatttggttctgttcttaacaagagttcttggtcaaagtaatgctgatgctgccaatagtgtcagcaagtggactggcacagtttatctgtgctcactcataggagctttcctcagtgattcatactggggcagatacttgacctgtgcagtctttcagttaatattcgtttcggggttggcgctcgtatcggtatcatcttgttatttcttgatcaaaccagatggatgtggtgatggagaattagcctgtgagccaacatcgtcggtgggagtggctattttttacttggctatatatttagttgcctttggatatggtgggcatcaaccttctttagccacatttggagcagaccaatttgacgagtcgaaaccgaaagaaaaaaattacaaggcagcttacttttgctatttctattttgcactcaactttggatctctattctcaaacactattttggtgtattttgaggatcatggaaaatggacactaggtttcctggtgtcattaggctctgcagttttagccttggtatcgttcttgtttgggacacctggttaccagtatgtgaaaccttgcggcaaccctttgccgcgagttgctcaggtgtttgtggctgcagttaagaaatgggatgttatcccggcgaaagctgatgaactttatgaagtggaaggaccagaatctgctatcaaagggagcagaaagattcttcatagtgatgattttgagtttttggacaaggcagcaacagtaacagaggatgatctaagtcaccaaaagaatccatggaggctttgcacaataagtcaagtagaggaagctaaatgtgttcttaaaatgttacctatttggctatgcactataatttactctgttgttttcacacaaatggcctccctctttgttgagcaaggagatgtcatgaactcctatgctggaaagtttcacctaccagcagctagcatgtctgcctttgatatctgcagtgtccttgtttgcactgggatttatcgccaaatcctcgtgccattagctggaaggttaagtggtaataccaaggggttaacggagcttcagagaatgggaatcggactcatcattgggatgctagcaatgttcgcagcaggggctactgagattgaaaggctcaagcatgttactgaagggaaaaaagttagctcactaagcatattttggcaaattccacaatacgttcttgtcggtgcatctgaggttttcatgtatgtaggccagttggagttctttaacgggcaagcaccagacgggattaagagttttggaagctcactttgcatggcttcaatctcccttggcaactatgtcagcagcatgctagtcagcatggtgatgaagattacagctaaaggtgacaagcctggatggatcccagatgacttgaacacaggccacatggacaggttctacttcctgattgcagtcttaacagcctttgattttgtgatttacttgttctgtgccaactggtacacgcctatcaacattgatgacagccacggaggaattgggatggaaaagcaagaagatgatgcgcttgcaagagtttaa

SEQ ID NO: 482 - protein, 602 aa, Populus balsamifera subsp. trichocarpa
  misc_feature (118)..(516): Pfam Name: PTR2 Pfam Description: POT family
  misc_feature: Ceres Annot ID no. 8755085
  misc_feature: Bit score of 1181.0 for HMM based on sequences of Figure 11
  misc_feature: Functional Homolog Of SEQ ID NO. 426
MDSDPSTDYQVTGESVISRENVAVNRIRTEEEHDIASNKRSITWKSSGGWKAASILLANQCLATLAFFGVGVNLVLFLTRVLGQSNADAANSVSKWTGTVYLCSLIGAFLSDSYWGRYLTCAVFQLIFVSGLALVSVSSCYFLIKPDGCGDGELACEPTSSVGVAIFYLAIYLVAFGYGGHQPSLATFGADQFDESKPKEKNYKAAYFCYFYFALNFGSLFSNTILVYFEDHGKWTLGFLVSLGSAVLALVSFLFGTPGYQYVKPCGNPLPRVAQVFVAAVKKWDVIPAKADELYEVEGPESAIKGSRKILHSDDFEFLDKAATVTEDDLSHQKNPWRLCTISQVEEAKCVLKMLPIWLCTIIYSVVFTQMASLFVEQGDVMNSYAGKFHLPAASMSAFDICSVLVCTGIYRQILVPLAGRLSGNTKGLTELQRMGIGLIIGMLAMFAAGATEIERLKHVTEGKKVSSLSIFWQIPQYVLVGASEVFMYVGQLEFFNGQAPDGIKSFGSSLCMASISLGNYVSSMLVSMVMKITAKGDKPGWIPDDLNTGHMDRFYFLIAVLTAFDFVIYLFCANWYTPINIDDSHGGIGMEKQEDDALARV

SEQ ID NO: 483 - protein, 551 aa, Vitis vinifera
  misc_feature (115)..(519): Pfam Name: PTR2 Pfam Description: POT family
  misc_feature: Public GI ID no. 147853446
  misc_feature: Bit score of 1137.1 for HMM based on sequences of Figure 11
  misc_feature: Functional Homolog Of SEQ ID NO. 426
MGSQEEEEVRSLLETGLLQNENSDLHTGDGSVDIHGKPVLRSNTGNWRACPFILGTECCERLAYYGIATNLVTYLTSKLHEGNVSAARNVTTWQGTCYLTPLIGAVLADAYCGRYWTIAAFSTIYFIGMCTLTLSATVPAFKPADCVGSVCPPATTAQYAVFFFGLYLIALGTGGIKPCVSSFGADQFDDTDPKERVKKGSFFNWFYFSINIGALVSSSFLVWIQDNAGWGLGFGIPALFMGIAIASFFSGTPLYRFQKPGGSPITRMCQVLVASFRKWKLEVPKDSNLLYETPDKNSAIEGSRKLEHSNELKCLDKAAVISDAEIKSGDFSNPWNLCTVTQVEELKILIRMFPIWATGIVFSAVYAQMSTMFVEQGMVMDTTVGSFTIPPASLSTFDVISVIFWVPVYDRILVPIARKFTGKERGFSELQRMGIGLFLSVLCMSAAALVEIKRLQLATALDLVDEDVAVPLSILWQIPQYFLLGAAEVFTFIGQLEFFYDQSPDAMRSLCSASSLLTTSLGNYLSAFILTVVTTLTTEBGKTGWIPDNLE

SEQ ID NO: 484 - protein, 547 aa, Vitis vinifera
  misc_feature (96)..(497): Pfam Name: PTR2 Pfam Description: POT family
  misc_feature: Public GI ID no. 157346087
  misc_feature: Bit score of 1069.5 for HMM based on sequences of Figure 11
  misc_feature: Functional Homolog Of SEQ ID NO. 426
MAEDDMYTKDGTMNIHNKPANKKKTGQWKACRFILGNECCERLAYYGMSTNLVNYLQIRLNQGNVTASNNVTNWSGTCYITPLIGAFLADAYFGRFWIIAIFSIIYFCGMVLLTMTASIKGLRPSCDDNGCDPTKLQSAVCFIALYLIALGTGGIKPCVSSFGADQFDVNDEAEKKKKSSFFNWFYLSINVGALIASSVLVWIQMNVGWGWGFGIPAVAMAIAVVSFFSGSRMYRLQKPGGSPLTRICQVLVASTRKYHVKVPNNKSLLYETKDAESNIKGSCKLEHTEKLRFFDKAAVEVESDHVKSSNNPWKLCTVTQVEELKSILRLLPVWATGILFSTVYSQMSTMFVLQGNTMDQHMGPNFKIPSASLSLFDTLSVIFWAPVYDRIIVPFARKFTGHERGFTQLQRMGIGLVISIISMIVAGILEVIRLNYVRKHNYYDLEYIPMSIFWQVPQYFLIGCAEVFTFIGQLEFYYDQAPDATRITIVNKVTTRNGKMGWIPDNMNRGHLDYFYWLLAILSLLNFLVYLWIAKWYTYKKVTGRPG

SEQ ID NO: 485 - DNA, 1797 bp, Populus balsamifera subsp. trichocarpa
  misc_feature: Ceres Annot ID no. 1538867
  misc_feature: Encodes the peptide sequence at SEQ ID NO. 486
atggcttgtttggaggtttgtaaggagggtaagttcaaagagggacgagaagaatgcacttttgatggaacagttgattggcatggtcgtcctgctatcaaagacaaatctgggcaatgggttgctggaattattatacttttgaaccaaggtctagcaacacttgcattctttggtgttggtgtgaacttagttctgttcctgacaagggttttgcaacaaagcaatgccgatgctgctaataacgttagcaaatggaccgggaccgtctacatcttctctcttgttggtgctttcctcagcgattcctactggggaagatacaaaacctgtgcaatttttcaggtcatctttgtcataggcctagtaatcctatcactctcgtcataccttttcttaatcagaccaaaaggatgtgggaatgagctgactccatgtggatcccattcaagcatggaagtttcattgttttacctctccatttacctcgttgctctaggaaatggagggtatcaacctaacattgctacatttggggctgatcagtttgatgaagaggaccccagggaaggacattccaaggttgcattttttagctacttctacctggccttgaacctcggttccctcttttccaacacaatattggggtattttgaggatgaaggggtgtgggcactaggattctgggcgtctgcaggttctgcctttgcagcattggtcttgtttctaggaggaacatctagataccggcacttcaaaccaagtggtaaccctctctccaggttctgccaagtcatcatcgctgcaatgaagaaatggaagctcgagatgccacgagatggagaggaggagctgtataatgtccatgcaaaagattgctcgatgaatggcaacagaaagattctccacactgatggattcaagttcttggatagagcagctttcatctcttcaagagatattgatgatcaaaagcggggctgtcgcaacccatggcgtctgtgcccaattacacaagtagaagaagttaaatgcatactgagactactcccaatttggctctgcaccataatctattcagtggttttcacacagatggcctctctgtttgttgagcagggtgctgcaatgaaaactacagtatcaaacttcaaaatccctcctgccagcatgtctagcttcgatattctaagtgttgcgtttttcattttcctatatcggcgagttcttgatccacttgtaagcagagttaaaaagacgggttcaaaaggactaactgaacttcaaagaatgggtgttggccttgtgatagcaatagtggcaatgatttcggctgggcttgtggagtgttatagactcaggtatgcaagaaaagactgcacacactgtgaaggctcaagctctatgagcatcttctggcaagttcctcagtatgcacttattggagcttctgaagttttcatgtatgttggtcaactggagttctttaatgcacaaactcctgatggattaaagagcttcggaagtgcactttgtatgacatctatctcgctagggaattacgtgagtagcttgcttgtgactatggttatgaagatctcgactgaggatcacatgcccggatggatccccggaaatctgaacaaaggtcacctggataggttttacttcctcttagcaaccttgacaactatagacctagttgtgtatatagcatgtgctaggtggtacaagtctatccaactggaaggaaaatgcgagctgaatgatcaggaagagaacttcagagtctga

SEQ ID NO: 486 - protein, 598 aa, Populus balsamifera subsp. trichocarpa
  misc_feature (108)..(517): Pfam Name: PTR2 Pfam Description: POT family
  misc_feature: Ceres Annot ID no. 1538867
  misc_feature: Bit score of 1302.6 for HMM based on sequences of Figure 11
  misc_feature: Functional Homolog Of SEQ ID NO. 426
MACLEVCKEGKFKEGREECTFDGTVDWHGRPAIKDKSGQWVAGIIILLNQGLATLAFFGVGVNLVLFLTRVLQQSNADAANNVSKWTGTVYIFSLVGAFLSDSYWGRYKTCAIFQVIFVIGLVILSLSSYLFLIRPKGCGNELTPCGSHSSMEVSLFYLSIYLVALGNGGYQPNIATFGADQFDEEDPREGHSKVAFFSYFYLALNLGSLFSNTILGYFEDEGVWALGFWASAGSAFAALVLFLGGTSRYRHFKPSGNPLSRFCQVIIAAMKKWKLEMPRDGEEELYNVHAKDCSMNGNRKILHTDGFKFLDRAAFISSRDIDDQKRGCRNPWRLCPITQVEEVKCILRLLPIWLCTIIYSVVFTQMASLFVEQGAAMKTTVSNFKIPPASMSSFDILSVAFFIFLYRRVLDPLVSRVKKTGSKGLTELQRMGVGLVIAIVAMISAGLVECYRLRYARKDCTHCEGSSSMSIFWQVPQYALIGASEVFMYVGQLEFFNAQTPDGLKSFGSALCMTSISLGNYVSSLLVTMVMKISTEDHMPGWIPGNLNKGHLDRFYFLLATLTTIDLVVYIACARWYKSIQLEGKCELNDQEENFRV

SEQ ID NO: 487 - DNA, 1779 bp, Medicago truncatula
  misc_feature: Ceres Annot ID no. 8755091
  misc_feature: Encodes the peptide sequence at SEQ ID NO. 488
atggcttgcttagaggtctgcaaagaggggaagttcaaagaagaaacagaagagttaactcttgatgggagtgttgattggcatggtcgcccatcaatcagagccacatccgggagatggtttgccggaactattatactcttgaaccaaggtctagcaaccttagcattctttggagttggagtgaacctagttctgttcttgacaagggtgttgggtcaagataatgctgctgctgctaacaatgtcagcaagtggactggcacagtttacatcttctctcttgttggtgctttccttagtgattcttattggggaagatacaaaacatgtgctatctttcaaggcatttttgtaaccggtctagtatctttgtccgttacaacataccttgctttgcttagaccaaaaggttgtggaaatggaaaacttgaatgtggggaacattcaagtttggaaatgggaatgttctacctatcaatctatctgattgccttaggaaatggagggtatcaaccaaacattgcaacatttggtgctgaccaatttgatgaagatcactcaaaggagagttattcaaaagtggcattttttagctacttttacttggcattgaaccttggttcacttttctcaaacactattttgggctattttgaagatgaaggattatgggctcttgggttttgggcttctgctgggtctgcctttttggctcttgtactttttcttgttggcaccccaaaatatagacactttaaaccttgtggcaatcctctttctagattctgccaagtgtttttcgctgcttcaaggaaattgggagttcaaatgacttcaaatggagatgacttgtatgtcatagatgaaaaggagtcttctaacaactccaacagaaagattctccacacacatggcttcaagtttttggatagggcagcttatataacttcaagagatttagaggtccaaaaaggaggccaacataacccatggtatctgtgtcctattactcaagttgaagaagtaaaatgcatactaagacttcttccaatttggctttgcacaataatctactcagtagttttcactcagatggcttccctttttgtggagcaaggtgctgcaatgaaaaccacaatttccagtttcaaaataccaccagcaagcatgtctagcttcgatatcctcagcgtagccatcttcattttcttctaccgtcgagtacttgatccactcgtcggaaaactcaaaaaatcaagttccaagggactcactgaacttcaaagaatgggaatcggtctcgttatagctataatcgcaatggttacagctggaatagttgaatgttacaggcttaagtatgcaaaacaaggtgacacaagctctctaagtatcttctggcaaattcctcagtatgcacttataggagcttctgaggtttttatgtatgtaggacaattagaatttttcaatgctcaaacacctgatggattaaagagctttggaagtgcactttgcatgacaagtatctcacttgggaactatgtgagtagcttaattgttagtattgttatgaagatttcaactgaagatcacatgccaggatggatccctggaaacttgaatagaggtcacttggataggtttttcttcctattggctgttttgacttctttagatttgattgcttatattgcatgtgcaaagtggtttcagaatattcagatggcatgcaaatatgataacaatgacgagcctagtagctgcaaagtttaa

SEQ ID NO: 488 - protein, 592 aa, Medicago truncatula
  misc_feature (108)..(511): Pfam Name: PTR2 Pfam Description: POT family
  misc_feature: Ceres Annot ID no. 8755091
  misc_feature: Bit score of 1252.7 for HMM based on sequences of Figure 11
  misc_feature: Functional Homolog Of SEQ ID NO. 426
MACLEVCKEGKFKEETEELTLDGSVDWHGRPSIRATSGRWFAGTIILLNQGLATLAFFGVGVNLVLFLTRVLGQDNAAAANNVSKWTGTVYIFSLVGAFLSDSYWGRYKTCAIFQGIFVTGLVSLSVTTYLALLRPKGCGNGKLECGEHSSLEMGMFYLSIYLIALGNGGYQPNIATFGADQFDEDHSKESYSKVAFFSYFYLALNLGSLFSNTILGYFEDEGLWALGFWASAGSAFLALVLFLVGTPKYRHFKPCGNPLSRFCQVFFAASRKLGVQMTSNGDDLYVIDEKESSNNSNRKILHTHGFKFLDRAAYITSRDLEVQKGGQHNPWYLCPITQVEEVKCILRLLPIWLCTIIYSVVFTQMASLFVEQGAAMKTTISSFKIPPASMSSFDILSVAIFIFFYRRVLDPLVGKLKKSSSKGLTELQRMGIGLVIAIIAMVTAGIVECYRLKYAKQGDTSSLSIFWQIPQYALIGASEVFMYVGQLEFFNAQTPDGLKSFGSALCMTSISLGNYVSSLIVSIVMKISTEDHMPGWIPGNLNRGHLDRFFFLLAVLTSLDLIAYIACAKWFQNIQMACKYDNNDEPSSCKV

SEQ ID NO: 489 - DNA, 1713 bp, Populus balsamifera subsp. trichocarpa
  misc_feature: Ceres Annot ID no. 1492702
  misc_feature: Encodes the peptide sequence at SEQ ID NO. 490
atggcagaggaggatgtttatacaaaagatggaacagtggattatcgtgggaatccagctaacaaaaaggagacgggaacctggagagcctgcccttatattataggaaatgaattttgtgaacgattggcttactatgggatgagctccaatctgattctttatttcaagcacagactgaatcaacaaagcgctacagctactagaaataacttgaattggggtggaacgtgctatctcactccattgattggagcattctttgctgatgcttatcttggtagatattggacgattgcttgtttctccatcatatatgttatggggatgacacttttgacaatctcagctactgtccctggcctaaggccaaaatgttatgcagaagatgattgtaatccaacagatgctcaaagtgcattagcttttgtatcactttacctaatagcactaggcactggtggtattaagccttgtgtctcatcctatggagcagatcagtttgatgacgctgatgaggttgagaaaaaacacaagagttctttcttcaactggttctacctctcaattaatgttggtgctcttattgccggttctgtgctggtttgggtacaagataatgtgagttggggttggggttttggcattccagcaatagccatggcaattgcggttgcgagcttcttttcaggtactcggttgttcaggtatcaaaagcctggaggcagccctcttactcgcatctgtcaggtgctgttggcatccttcagaaaaaagaaagttgaagttccagctgacaaggctttgttgtatgagactgcggatgccgaatccaacatcaaaggaagccgcaagcttgaccatactgaagaatttagtttccttgacaaggcagcagtggaaacagaaaaggacgacataaaggggccagtagacccatggagactttgcactgtaacccaagttgaggagctaaagtctatcattcggttgcttcccatatgggccacaggtatcatctttactgcagtgtacagccagatggggaacctatttgtgctgcaaggtgaacagatggataaatatgttggaaactccaatttccagataccatctgcatctctatcaatctttgacactcttagtgtcattttttgggtcccggtctatgaccgaattattgtcccagttgcaagaaaatacaccggacacaaaaatggcttaactcaactgcagcggatgggcattggtctcttcatatcaatattttccatggtatctgcagcaatcttggaacttaaaagacttgaaatggtgagaaggcacaactcctacgaacttaaaaccgtgcccttgtctatattttggcaagctccacagtatttcctgatagggtgtgcagaagttttcacattcatcggacagttggaattcttctacgagcaagcacctgatgcaatgaggagcatgtgttctgccctatcactcaccaccgtcgcacttggtagttacttaagctctcttcttgtaaccattgttacaagcatcagcactaagaatggaaagcctggatggataccggagaacttaaattatggtcacattgattacttcttctggctactgggagtactcagtgtgctgaatctatgtgtctttctcttgatctcaaattggtacacgtataaaaagccagtgggaactcttcgttga

SEQ ID NO: 490 - protein, 570 aa, Populus balsamifera subsp. trichocarpa
  misc_feature (96)..(499): Pfam Name: PTR2 Pfam Description: POT family
  misc_feature: Ceres Annot ID no. 1492702
  misc_feature: Bit score of 1122.2 for HMM based on sequences of Figure 11
  misc_feature: Functional Homolog Of SEQ ID NO. 426
MAEEDVYTKDGTVDYRGNPANKKETGTWRACPYIIGNEFCERLAYYGMSSNLILYFKHRLNQQSATATRNNLNWGGTCYLTPLIGAFFADAYLGRYWTIACFSIIYVMGMTLLTISATVPGLRPKCYAEDDCNPTDAQSALAFVSLYLIALGTGGIKPCVSSYGADQFDDADEVEKKHKSSFFNWFYLSINVGALIAGSVLVWVQDNVSWGWGFGIPAIAMAIAVASFFSGTRLFRYQKPGGSPLTRICQVLLASFRKKKVEVPADKALLYETADAESNIKGSRKLDHTEEFSFLDKAAVETEKDDIKGPVDPWRLCTVTQVEELKSIIRLLPIWATGIIFTAVYSQMGNLFVLQGEQMDKYVGNSNFQIPSASLSIFDTLSVIFWVPVYDRIIVPVARKYTGHKNGLTQLQRMGIGLFISIFSMVSAAILELKRLEMVRRHNSYELKTVPLSIFWQAPQYFLIGCAEVFTFIGQLEFFYEQAPDAMRSMCSALSLTTVALGSYLSSLLVTIVTSISTKNGKPGWIPENLNYGHIDYFFWLLGVLSVLNLCVFLLISNWYTYKKPVGTLR

SEQ ID NO: 491 - DNA, 1887 bp, Zea mays
  misc_feature: Ceres Clone ID no. 325604
  misc_feature: Encodes the peptide sequence at SEQ ID NO. 492
ggggttgggggaggccctctgtctccatggatgaggcagcagggctgctgttgcaagaagagggtggaggtggggaccaagaagctctcctccttccacttccacaggatgttggcctttacacaggtgatggatctgttgatgtcaaagggcgccctgcgttaaagggcactacaggcaattggaaagcatgctttttcatcctagggaatgaatgttgtgaaaggctggcctactacggaattgcaaaaaacctagttacttatttgaaagtgaagcttcatctaggcaacctcgaggctgcaagacatgttaccacttggcaagggacatgctatctcactccccttgttggaggcatcttagcagactctcgttgggggaaatactggactattgctgttttctcatcggtttactttattggcctggctattttaacgctttctgcatcagtcccagcgttgcaaccaccttcatgtttaaggacagtttgtccagaagcaagcttacttcagtatggcatattttttggtggcctctatatgattgccctagggactggaggtatcaaaccttgtgtctcctcctttggagctgatcaatttgatgacactgaccaagcagagagagctaagaagggttcattcttcaattggttctacttctgtataaatatagtttcattcatatcaggcactatgatagtgtggatacaagataacactggttggggaataggctttgcgattcctactatattcatggcattagctatttcattcttcttctcagcttcaaataagtacagattccaaaaacctggtgggagtccactcacaagagtgtgccaggtggttatagcagcatttcgtaagtggcacattgaagtgccacatgatacatctctcctatatgaagttgatggccaaacttcagcaattgaaggaagccggaagctggagcacacaaatgagctcgagttccttgatagagctgctgttatctcatctgctgatctgaagagtgaatcctttaccgacccatggaagctttgcacagttacccaggtggaagaattgaagatcctaataagaatgtttcccatttgggctactactatcatattcagtgctgtttatgcccaaaactcttccatgttcatagagcagggcatggttcttgacaagcgcattgggtctttcaacattcctcctgcatctctctccacttttgatgtaatcagcgtcatcatgtgggtcccactctatgaccgcatcctggtgccactagctagaaaattcactggaagggagaagggtttttctgagctacagcggatgggaattggattagtcctgtccattctcgcgatgttatctgcagctctagttgagttgaagcgtttagagattgccaggtctgaaggtctcattcatgagaaggctgctgttccaatgagcattctttggcaaataccacaatatttcttggtgggcgctgctgaggtgtttacttgtattggtcaagttgagttcttttacgatcaggccccagatgccatgaggagtttatgtagtgcacttgcacttattacagtctcactgggaaactatataagctccatcatactgacattggtgtcgtacattacaactcagggaggagatcctggatggatccctgacaatctgaatgaaggccatctcgaccggttcttttggttaattgcagggataagctttgtaaatttgatagtttatatgggttgtgctgtcagatacagatataagaaagcctcttgattatatttatgtgaactcttgtaatgtgatttcccattcccgatatcatacttatcaaatacaatgcactgtacagatttct

SEQ ID NO: 492 - protein, 592 aa, Zea mays
  misc_feature (121)..(525): Pfam Name: PTR2 Pfam Description: POT family
  misc_feature: Ceres Clone ID no. 325604
  misc_feature: Bit score of 1162.3 for HMM based on sequences of Figure 11
  misc_feature: Functional Homolog Of SEQ ID NO. 426
MDEAAGLLLQEEGGGGDQEALLLPLPQDVGLYTGDGSVDVKGRPALKGTTGNWKACFFILGNECCERLAYYGIAKNLVTYLKVKLHLGNLEAARHVTTWQGTCYLTPLVGGILADSRWGKYWTIAVFSSVYFIGLAILTLSASVPALQPPSCLRTVCPEASLLQYGIFFGGLYMIALGTGGIKPCVSSFGADQFDDTDQAERAKKGSFFNWFYFCINIVSFISGTMIVWIQDNTGWGIGFAIPTIFMALAISFFFSASNKYRFQKPGGSPLTRVCQVVIAAFRKWHIEVPHDTSLLYEVDGQTSAIEGSRKLEHTNELEFLDRAAVISSADLKSESFTDPWKLCTVTQVEELKILIRMFPIWATTIIFSAVYAQNSSMFIEQGMVLDKRIGSFNIPPASLSTFDVISVIMWVPLYDRILVPLARKFTGREKGFSELQRMGIGLVLSILAMLSAALVELKRLEIARSEGLIHEKAAVPMSILWQIPQYFLVGAAEVFTCIGQVEFFYDQAPDAMRSLCSALALITVSLGNYISSIILTLVSYITTQGGDPGWIPDNLNEGHLDRFFWLIAGISFVNLIVYMGCAVRYRYKKAS

SEQ ID NO: 493 - protein, 621 aa, Oryza sativa subsp. japonica
  misc_feature (150)..(552): Pfam Name: PTR2 Pfam Description: POT family
  misc_feature: Public GI ID no. 108707040
  misc_feature: Bit score of 1063.1 for HMM based on sequences of Figure 11
  misc_feature: Functional Homolog Of SEQ ID NO. 426
MEGVLLQQELPKKQFKAEHLSSWRVQQPFRAAKGAFMGSSLEAEQQSLIVRTTEPEDVDDYTGDGSVGFSGQPILKHETGNWRACSLILGTEVCERLAYYGISKSLVTYLSTRLHEGNVSAARNFTTWQGTCYLTPLIGATLADSYWGKYKTIAVFSTIYFLGMAALTFSALVPSLQPPQCFGSFCPQPTVPQYLIYFVGLYMIALGSGGIKPCVSSFGADQFDDTDPVERTKKGAFFNWFYFAINIGSLISGTVLIWVQQNCGYGIGFGIPTIFIALAIGSFFIGSQRYRYQIPGGSPLIRVCQVVIAAIHKRNVDLPVDSSVLYELHGKTSAIEGSRKLEHSSEFSFLDKAAVILSNERGGSHDPWRLCTITQVEELKILMRMFPIWATGIVFFTVCAQNSSMFIEQGMALNNQIESFKIPPATLSSLDVISIVVWVPIYETFVVPIASRLTGKERGFSELQRMGIGLFVATTAVATAALVEIKRLEIARSEDLIHSKVPVPMSILWQAPQYLLVGIGEVFTAIGQAEFFYNQSPDSMRSLCSAFALVTVSLGSYLSSFILTLVSYFTTRDDNPGWIPDNLNEGHLDRFFWLIAGLSFLNLLLFVYYAQQYKCKKAAAI

SEQ ID NO: 494 - DNA, 1845 bp, Arabidopsis thaliana
  misc_feature: Ceres Annot ID no. 1302517
  misc_feature: Encodes the peptide sequence at SEQ ID NO. 495
atgtcttgcctagagatttataacaaagacacgatgaagaagaaagaaggagaagaagaaacaagagatgggacagtggattactatggtcgtccctctattcgttctaactcaggccaatgggttgctggcatcgtcattcttctgaaccaggggctggctacactagccttctttggagttggagtgaacttggtgctcttcctaactcgcgttttgcagcagaacaacgcagacgcagctaacaacgttagcaaatggacagggactgtttatatcttctcattggttggagcgtttctcagcgattcgtattggggtcgttacaagacttgtgctatcttccaagtcatttttgtcattggactttcatcgctatcgctatcatcatacatgttcttgattagaccaagaggttgtggggacgaagtcacgccttgtggttcacattccatgatggagatcacaatgttctacttctcgatctacttgatcgcattgggatatggcggttaccaaccaaacattgcaacgcttggagcggatcagttcgatgaggagcatcctaaagaagggtactcgaagattgcgtttttcagctacttttaccttgctttaaacctcggatcgctcttttcgaacaccatcttggggtattttgaggatgagggaatgtgggcactcgggttttgggcatccactggctctgctatcattgggttgattcttttccttgttggaacaccgagataccgatatttcaagcccacggggaatcctctttcgaggttttgccaagttttggtcgctgcaacgaagaaatcatcggtggaggcaccattaagagggagagaggagatgtatgacggagacagcgaagggaaaaatgcttcagttaacacagggagaaggatagtgcataccgatgaattcaagttcttggacaaagcagcgtacatcacagctagagatctagatgacaagaaacaagactcagtgaacccatggaggctctgtccagtgacacaagtcgaggaagtcaagtgtattcttagactgatgccaatttggctctgcactataatctactcagtcgtcttcactcaaatggcctctctctttgtggagcaaggcgctgcaatgaatacctctgtctcagatttcaaaatccccccggcaagtatgtccagcttcgacatccttagcgtcgctttgttcatattcctgtaccgcagagttctcgagccagtagccaacagattcaaaaagaatggatcaaaaggaatcaccgagcttcacaggatgggaatcggacttgtgattgctgtcatagctatgattgcagccgggattgtggaatgctataggcttaagtatgcagacaagagttgtactcactgtgatggctcaagctccttaagcatcttctggcaggctccacaatactcactcatcggggcatcagaagtgttcatgtacgtgggtcagcttgagttcttcaacgcgcaaacaccagacggactaaagagcttcgggagcgctctgtgtatgatgtcaatgtcaatggggaactttgttagtagcttgttggtaacaatggtggtgaagatctcaacagaggatcacatgcctggttggattccaaggaatctcaacaaaggtcacttagacagattctatttcctcctggctgcgttgacgagcattgacctggtggtatacattgcatgtgcaaaatggtacaaacctatacaactagaaggaaaagatgagatgcaagacatgagtgatgatgactatgacaccgagagtgaagaggaacgagagaaggattctaaagtctaa

SEQ ID NO: 495 - protein, 614 aa, Arabidopsis thaliana
  misc_feature (109)..(520): Pfam Name: PTR2 Pfam Description: POT family
  misc_feature: Ceres Annot ID no. 1302517
  misc_feature: Bit score of 1239.2 for HMM based on sequences of Figure 11
  misc_feature: Functional Homolog Of SEQ ID NO. 426
MSCLEIYNKDTMKKKEGEEETRDGTVDYYGRPSIRSNSGQWVAGIVILLNQGLATLAFFGVGVNLVLFLTRVLQQNNADAANNVSKWTGTVYIFSLVGAFLSDSYWGRYKTCAIFQVIFVIGLSSLSLSSYMFLIRPRGCGDEVTPCGSHSMMEITMFYFSIYLIALGYGGYQPNIATLGADQFDEEHPKEGYSKIAFFSYFYLALNLGSLFSNTILGYFEDEGMWALGFWASTGSAIIGLILFLVGTPRYRYFKPTGNPLSRFCQVLVAATKKSSVEAPLRGREEMYDGDSEGKNASVNTGRRIVHTDEFKFLDKAAYITARDLDDKKQDSVNPWRLCPVTQVEEVKCILRLMPIWLCTIIYSVVFTQMASLFVEQGAAMNTSVSDFKIPPASMSSFDILSVALFIFLYRRVLEPVANRFKKNGSKGITELHRMGIGLVIAVIAMIAAGIVECYRLKYADKSCTHCDGSSSLSIFWQAPQYSLIGASEVFMYVGQLEFFNAQTPDGLKSFGSALCMMSMSMGNFVSSLLVTMVVKISTEDHMPGWIPRNLNKGHLDRFYFLLAALTSIDLVVYIACAKWYKPIQLEGKDEMQDMSDDDYDTESEEEREKDSKV

SEQ ID NO: 496 - DNA, 1830 bp, Arabidopsis thaliana
  misc_feature: Ceres Annot ID no. 1355964
  misc_feature: Encodes the peptide sequence at SEQ ID NO. 497
atggccgctatggatccgagaaataatggcaacgttgctccgctaaatgagcgggagagagcagaaaatttggaagttcgtgaagtggtagaggttcaagatgatcaaagtgtggtgtctcttatgtccaacgattctgaccttcagaaaaagatgatgaagaaagaggagaagaagaatggtggctggacaaacgcaatcattttgctagtaaatcaagggttagctacattggccttctttggtgtgggagtaaacttggtgttgttcctaacacgtgttatgggacaaggtaatgcagaagctgcgaacaatgtaagcaagtggacaggaacagtttacatgttctctctcgttggggcatttcttagtgactcctattggggtcgttacttgacttgcacgatattccaagtcatcttcgttatcggtgttggcctcctctcttttgtctcttggtttttcttgattaaacctcgaggatgtggcgatggggaccttgaatgcaaccctccctcttccctcggagttgctatcttttatctatctgtatatttggtagcttttggatacggaggccaccagccaacgctggctactttcggtgcagaccagcttgatgatgataaaaactccaaagctgcgtttttcagctacttctactttgctctcaacgtgggagctctcttttcaaacacaatccttgtttattttgaggataaagggttgtggactgaaggtttcttggtgtcactaggctccgctattgtcgcattggtggcttttttggccccaacaagacaatatcgttatgtcaagccgtgtggtaacccgttgcctcgtgtggcgcaagtatttgtggccactgctcgtaagtggagtgttgttcgaccaggagatccgcatgagttgtacgaacttgaaggtcctgaatccgccattaaaggaagtcgaaagatatttcatagtaccaaatttctcttcttggatagagcagcagtgattacagagaatgataggaatgggacaaggagcaatgcatggaggttgtgcagtgtaactcaagtagaggaggcaaaatgtgtgatgaagttgcttccaatatggctatgcactataatctactcagtgatcttcacacaaatggcgtcattgtttgtggagcaaggtgatgtgatgaatgcatacgtagggaaattccacatccccgcagcgagcatgtcggtcttcgacatattcagcgtctttgtatcaacaggaatctaccgccacatcatatttccatacgtgagacccacggaacttatgcggatggggatagggctgatcatagggataatggcaatggtagctgcaggattaacagagatccaacggctgaaacgagtagtcccggggcaaaaggagagtgagctcaccattttatggcaaattccacagtacgtgcttgtgggagcaagtgaggtgttcatgtacgttggacagttagagttcttcaacggacaagcaccagacgggttaaagaacttaggaagctcgttgtgtatggcttcgatggctttaggtaactacgtgagcagtttgatggttaatattgttatggccataaccaaaagaggtgagaatagccccgggtggataccggaaaatctcaacgaaggtcatatggatcggttttattttctgattgccgcgttagcagctatcgattttgtggtttatttgatatttgcaaagtggtaccaacccataagtcatgatgaagatagtatcaagggcggttctggtggtagtctgaagaagaccgtttctgagttggaacaagtttga

SEQ ID NO: 497 - protein, 609 aa, Arabidopsis thaliana
  misc_feature (131)..(519): Pfam Name: PTR2 Pfam Description: POT family
  misc_feature: Ceres Annot ID no. 1355964
  misc_feature: Bit score of 1088.7 for HMM based on sequences of Figure 11
  misc_feature: Functional Homolog Of SEQ ID NO. 426
MAAMDPRNNGNVAPLNERERAENLEVREVVEVQDDQSVVSLMSNDSDLQKKMMKKEEKKNGGWTNAIILLVNQGLATLAFFGVGVNLVLFLTRVMGQGNAEAANNVSKWTGTVYMFSLVGAFLSDSYWGRYLTCTIFQVIFVIGVGLLSFVSWFFLIKPRGCGDGDLECNPPSSLGVAIFYLSVYLVAFGYGGHQPTLATFGADQLDDDKNSKAAFFSYFYFALNVGALFSNTILVYFEDKGLWTEGFLVSLGSAIVALVAFLAPTRQYRYVKPCGNPLPRVAQVFVATARKWSVVRPGDPHELYELEGPESAIKGSRKIFHSTKFLFLDRAAVITENDRNGTRSNAWRLCSVTQVEEAKCVMKLLPIWLCTIIYSVIFTQMASLFVEQGDVMNAYVGKFHIPAASMSVFDIFSVFVSTGIYRHIIFPYVRPTELMRMGIGLIIGIMAMVAAGLTEIQRLKRVVPGQKESELTILWQIPQYVLVGASEVFMYVGQLEFFNGQAPDGLKNLGSSLCMASMALGNYVSSLMVNIVMAITKRGENSPGWIPENLNEGHMDRFYFLIAALAAIDFVVYLIFAKWYQPISHDEDSIKGGSGGSLKKTVSELEQV

SEQ ID NO: 498 - DNA, 1758 bp, Arabidopsis thaliana
  misc_feature: Ceres Annot ID no. 8755104
  misc_feature: Encodes the peptide sequence at SEQ ID NO. 499
atggccgctatggatccgagaaataatggcaaccgggagagagcagaaaatttggaagttcgtgaagtggtagaggttcaagatgatcaaagtgtggagaagaagaatggtggctggacaaacgcaatcattttgctagtaaatcaagggttagctacattggccttctttggtgtgggagtaaacttggtgttgttcctaacacgtgttatgggacaaggtaatgcagaagctgcgaacaatgtaagcaagtggacaggaacagtttacatgttctctctcgttggggcatttcttagtgactcctattggggtcgttacttgacttgcacgatattccaagtcatcttcgttatcggtgttggcctcctctcttttgtctcttggtttttcttgattaaacctcgaggatgtggcgatggggaccttgaatgcaaccctccctcttccctcggagttgctatcttttatctatctgtatatttggtagcttttggatacggaggccaccagccaacgctggctactttcggtgcagaccagcttgatgatgataaaaactccaaagctgcgtttttcagctacttctactttgctctcaacgtgggagctctcttttcaaacacaatccttgtttattttgaggataaagggttgtggactgaaggtttcttggtgtcactaggctccgctattgtcgcattggtggcttttttggccccaacaagacaatatcgttatgtcaagccgtgtggtaacccgttgcctcgtgtggcgcaagtatttgtggccactgctcgtaagtggagtgttgttcgaccaggagatccgcatgagttgtacgaacttgaaggtcctgaatccgccattaaaggaagtcgaaagatatttcatagtaccaaatttctcttcttggatagagcagcagtgattacagagaatgataggaatgggacaaggagcaatgcatggaggttgtgcagtgtaactcaagtagaggaggcaaaatgtgtgatgaagttgcttccaatatggctatgcactataatctactcagtgatcttcacacaaatggcgtcattgtttgtggagcaaggtgatgtgatgaatgcatacgtagggaaattccacatccccgcagcgagcatgtcggtcttcgacatattcagcgtctttgtatcaacaggaatctaccgccacatcatatttccatacgtgagacccacggaacttatgcggatggggatagggctgatcatagggataatggcaatggtagctgcaggattaacagagatccaacggctgaaacgagtagtcccggggcaaaaggagagtgagctcaccattttatggcaaattccacagtacgtgcttgtgggagcaagtgaggtgttcatgtacgttggacagttagagttcttcaacggacaagcaccagacgggttaaagaacttaggaagctcgttgtgtatggcttcgatggctttaggtaactacgtgagcagtttgatggttaatattgttatggccataaccaaaagaggtgagaatagccccgggtggataccggaaaatctcaacgaaggtcatatggatcggttttattttctgattgccgcgttagcagctatcgattttgtggtttatttgatatttgcaaagtggtaccaacccataagtcatgatgaagatagtatcaagggcggttctggtggtagtctgaagaagaccgtttctgagttggaacaagtttga

SEQ ID NO: 499 - protein, 585 aa, Arabidopsis thaliana
  misc_feature (107)..(495): Pfam Name: PTR2 Pfam Description: POT family
  misc_feature: Ceres Annot ID no. 8755104
  misc_feature: Bit score of 1097.7 for HMM based on sequences of Figure 11
  misc_feature: Functional Homolog Of SEQ ID NO. 426
MAAMDPRNNGNRERAENLEVREVVEVQDDQSVEKKNGGWTNAIILLVNQGLATLAFFGVGVNLVLFLTRVMGQGNAEAANNVSKWTGTVYMFSLVGAFLSDSYWGRYLTCTIFQVIFVIGVGLLSFVSWFFLIKPRGCGDGDLECNPPSSLGVAIFYLSVYLVAFGYGGHQPTLATFGADQLDDDKNSKAAFFSYFYFALNVGALFSNTILVYFEDKGLWTEGFLVSLGSAIVALVAFLAPTRQYRYVKPCGNPLPRVAQVFVATARKWSVVRPGDPHELYELEGPESAIKGSRKIFHSTKFLFLDRAAVITENDRNGTRSNAWRLCSVTQVEEAKCVMKLLPIWLCTIIYSVIFTQMASLFVEQGDVMNAYVGKFHIPAASMSVFDIFSVFVSTGIYRHIIFPYVRPTELMRMGIGLIIGIMAMVAAGLTEIQRLKRVVPGQKESELTILWQIPQYVLVGASEVFMYVGQLEFFNGQAPDGLKNLGSSLCMASMALGNYVSSLMVNIVMAITKRGENSPGWIPENLNEGHMDRFYFLIAALAAIDFVVYLIFAKWYQPISHDEDSIKGGSGGSLKKTVSELEQV

SEQ ID NO: 500 - protein, 568 aa, Vitis vinifera
  misc_feature (96)..(497): Pfam Name: PTR2 Pfam Description: POT family
  misc_feature: Public GI ID no. 147802380
  misc_feature: Bit score of 1155.1 for HMM based on sequences of Figure 11
  misc_feature: Functional Homolog Of SEQ ID NO. 426
MAEDDMYTKDGTMNIHNKPANKKKTGQWKACRFILGNECCERLAYYGMSTNLVNYLQIRLNQGNVTASNNVTNWSGTCYITPLIGAFLADAYFGRFWIIAIFSIIYFCGMVLLTMTASIKGLRPSCDDNGCDPTKLQSAVCFIALYLIALGTGGIKPCVSSFGADQFDVNDEAEKKKKSSFFNWFYLSINVGALIASSVLVWIQMNVGWGWGFGIPAVAMAIAVVSFFSGSRMYRLQKPGGSPLTRICQVLVASTRKYHVKVPNNKSLLYETKDAESNIKGSCKLEHTEKLRFFDKAAVEVESDHVKSSNNPWKLCTVTQVEELKSILRLLPVWATGILFSTVYSQMSTMFVLQGNTMDQHMGPNFKIPSASLSLFDTLSVIFWAPVYDRIIVPFARKFTGHERGFTQLQRMGIGLVISIISMIVAGILEVIRLNYVRKHNYYDLEYIPMSIFWQVPQYFLIGCAEVFTFIGQLEFYYDQAPDATRSLCSALSLTTNALGNYLSTLLVTIVNKVTTRNGKMGWIPDNMNRGHLDYFYWLLAILSLLNFLVYLWIAKWYTYKKVTGRPG

SEQ ID NO: 501 - protein, 586 aa, Arabidopsis thaliana
  misc_feature (113)..(518): Pfam Name: PTR2 Pfam Description: POT family
  misc_feature: Public GI ID no. 510238
  misc_feature: Bit score of 1169.8 for HMM based on sequences of Figure 11
  misc_feature: Functional Homolog Of SEQ ID NO. 426
MGSIEEEARPLIEEGLILQEVKLYAEDGSVDFNGNPPLKEKTGNWKACPFILGNECCERLAYYGIAGNLITYLTTKLHQGNVSAATNVTTWQGTCYLTPLIGAVLADAYWGRYWTIACFSGIYFIGMSALTLSASVPALKPAECIGDFCPSATPAQYAMFFGGLYLIALGTGGIKPCVSSFGADQFDDTDSRERVRKASFFNWFYFSINIGALVSSSLLVWIQENRGWGLGFGIPTVFMGLAIASFFFGTPLYRFQKPGGSPITRISQVVVASFRKSSVKVPEDATLLYETQDKNSAIAGSRKIEHTDDCQYLDKAAVISEEESKSGDYSNSWEDLCTVTQVEELKILIRMFPIWASGIIFSAVYAQMSTMFVQQGRAMNCKIGSFQLPPAALGTFDTASVIIWVPLYDRFIVPLARKFTGVDKGFTEIQRMGIGLFVSVLCMAAAAIVEIIRLHMANDLGLVESGAPVPISVLWQIPQYFILGAAEVFYFIGQLEFFYDQSPDAMRSLCSALALLTNALGNYLSSLILTLVTYFTTRNGQEGWISDNLNSGHLDYFFWLLAGLSLVNMAVYFFSAARYKQKKASS

SEQ ID NO: 502 - protein, 603 aa, Vitis vinifera
  misc_feature (120)..(528): Pfam Name: PTR2 Pfam Description: POT family
  misc_feature: Public GI ID no. 157341962
  misc_feature: Bit score of 1310.8 for HMM based on sequences of Figure 11
  misc_feature: Functional Homolog Of SEQ ID NO. 426
MKKKAEYINFWLEFAYYLSFQVKFKAGEEACTLDGTVDCRGNPAIRSRSGKWFAGIIILLNQGLATLAFFGVGVNLVLFLTRVLQQNNADAANNVSKWTGTVYIFSLVGAFLSDSYWGRYKTCAIFQVIFVIGLVSLSLSSYIFLVKPEGCGNEDSPCPSHSSLEIGLFYLSIYLVALGNGGYQPNIATLGADQFDEEDPKEGHSKVAFFSYFYLALNLGSLFSNTILSYLEDEGMWALGFWVSAGSAFLALILFLGGTPRYRHFKPSGNPLSRFCQVMVAAMRKFRVEMPPSAEDLYEGDGKECSNNSIRRILHTDGFKFLDRAAFISSKDSDNQEQGFYNQWRLCPITQVEEVKCILRLIPIWLCTIIYSVVFTQMASLFVEQGAAMKTTVSNFRIPPASMSSFDILSVAAFIFLYRRVLDPLVGRIRKTDTKGLTELQRMGIGLIIAIIAMIAAGIVECYRLKYAQKDCTNCEGSSSLSIFWQVPQYAFIGASEVFMYVGQLEFFNAQTPDGLKSFGSALCMTSISLGNYVSSLLVTMVMKISTEDHMPGWIPGNLNKGHLDRFYFLLATLTALDLVVYVACAKWYKCIKMEDRANEYGV

SEQ ID NO: 503 - protein, 559 aa, Prunus dulcis
  misc_feature (113)..(517): Pfam Name: PTR2 Pfam Description: POT family
  misc_feature: Public GI ID no. 6635838
  misc_feature: Bit score of 1117.9 for HMM based on sequences of Figure 11
  misc_feature: Functional Homolog Of SEQ ID NO. 426
  misc_feature (46)..(46): Xaa is any aa, unknown, or other
MGSLEEERSLLEDGLIQDETNGLYTGDGSVDITGKPVLKQSTGNWXACPFILGTECCERLAFYGISTNLVTYLTHKLHEGNVSAARNVTTWSGTCYLTPLIGAVLADAYWGRYWTIAIFSTIYFIGMCTLTISASVPALKPPQCVDSVCPSASPAQYGVFFFGLYLIALRTGGIKPCVSSFGADQFDDTDSRERVKKGSFFNWFYFSINIGALVSSTLIVWVQDNAGWGLGFGIPALFMGIAIVSFFSGTPLYRFQKPGGSPLTRMCQVLVASFRKWNLDVPRDSSLLYETQDKGSAIKGSRKLEHSDELNCLDKAAVISETETKTGDFSNPWRICTVTQVEELKILIRMFPIWATGIVFSAVYAQMATMFVEQGMMMDTSVGSFTIPPASLSSFDVISVIFWVPIYDRFIVPIARKFTGKERGFSELQRMGIGLFLSVLCMSAAAVVEMKRLQLATELGLVDKEVAVPLSIFWQIPQYFLLGAAEIFTFIGQLEFFYDQSSDAMRSLCSALSASDDFIGKLSELFDSDIVTYFTTQGGKAGWIPDNLNDGHLDYFSGS

SEQ ID NO: 504 - protein, 576 aa, Arabidopsis thaliana
  misc_feature (87)..(496): Pfam Name: PTR2 Pfam Description: POT family
  misc_feature: Public GI ID no. 4455276
  misc_feature: Bit score of 1251.8 for HMM based on sequences of Figure 11
  misc_feature: Functional Homolog Of SEQ ID NO. 426
MDQKVRQFEVCTQDGSVDRHGNPAIRANTGKWLTAILILGVNLVLFLTRVMGQDNAEAANNVSKWTGTVYIFSLLGAFLSDSYWGRYKTCAIFQASFVAGLMMLSLSTGALLLEPSGCGVEDSPCKPHSTFKTVLFYLSVYLIALGYGGYQPNIATFGADQFDAEDSVEGHSKIAFFSYFYLALNLGSLFSNTVLGYFEDQGEWPLGFWASAGSAFAGLVLFLIGTPKYRHFTPRESPWSRFCQVLVAATRKAKIDVHHEELNLYDSETQYTGDKKILHTKGFRFLDRAAIVTPDDEAEKVESGSKYDPWRLCSVTQVEEVKCVLRLLPIWLCTILYSVVFTQMASLFVVQGAAMKTNIKNFRIPASSMSSFDILSVAFFIFAYRRFLDPLFARLNKTERNKGLTELQRMGIGLVIAIMAMISAGIVEIHRLKNKEPESATSISSSSTLSIFWQVPQYMLIGASEVFMYVGQLEFFNSQAPTGLKSFASALCMASISLGNYVSSLLVSIVMKISTTDDVHGWIPENLNKGHLERFYFLLAGLTAADFVVYLICAKWYKYIKSEASFSESVTEEEEV

SEQ ID NO: 505 - DNA, 1779 bp, Sorghum bicolor
  misc_feature: Ceres Annot ID no. 8642246
  misc_feature: Encodes the peptide sequence at SEQ ID NO. 506
atggatgaggcaccagggctgctgttgcaagaagagggtggaggtagggaccacgaaccgctcctccttccacttccacaggatgctggcctttacacaggtgatggatctgttgatgtcaaagggtgtcctgcattaaagggcactacaggcaattggaaagcatgttttttcatcctagggaatgagtgttgtgaaaggctggcctactacggaattgcaaaaaacctagttacttatttgaaagtgaagcttcatctaggcaaccttgaggctgcaagacatgttaccacttggcaagggacatgctatcttactccccttgttggagccatcttagcagattctcattgggggaaatactggacaattgctgttttctcatcagtttactttattggcctggctattttgacgctgtcagcatcagtcccagcattgcagccaccttcatgtttaagaacagtttgtccagaagcaagcttacttcagtatggcgtattttttgttggtctctatatgatagccctagggacaggaggtatcaaaccttgtgtctcctcctttggagctgatcaatttgatgacactgacccagcagagagagctaagaagggctccttcttcaattggttctacttctgtataaatattggtgcattcatatcaggcactatcatagtgtggatacaagataacactggttggggaataggatttgcaattcctactatattcatggcattagctatttcattcttcctcacagcttcaaataagtacagattccaaaaacctggtgggagtccactcacaagagtgtgccaggtagttatagcagcatttcgtaagtggcacattgaagtgccacatgatacatctctcctctatgaagttgatggccaaacttcagcaattgagggaagccggaagctggagcacacaaatgagctcgagttccttgatagagctgccgttatctcatctgctgacctgaagagcgaatcctttacagacccatggaagctttgcacagttacccaggtggaagaattgaagattctaataagaatgtttcccgtttgggctactactatcatattcagtgctgtttacgcccaaaactcttccatgttcatagagcagggcatggttcttgacaagcgcattggatctttcaatattcctcctgcatctctctcaacttttgatgtaatcagcgtcatcatatgggttccactttatgaccgcattctggtgccagtagctagaaaattcactggaagggagaagggtttttctgagctccagcggatgggaattggattagccctgtcaattcttgcgatggtatctgcagctcttgttgagttgaagcgtttagagattgccaggtctgaaggtcttattcatgagaaggctgctgttccaatgagcattctttggcaaataccacaatatttcttggtgggtgctgctgaggtgtttacttgtataggtcaagtcgagttcttttacgatgaggccccagatgccatgaggagtttatgtagtgcatttgcacttattacagtctcactgggaagctatataagctccatcatactgacgttggtgtcgtgcattacaactcagggaggagatcctggatggatccctgacaatctgaatgaaggccatctcgaccggttcttttggttaattgctgggataagctttgtgaatttgatagtttacatgggctgtgctgtgagatacagatataagaaagcctcttga

SEQ ID NO: 506 - protein, 592 aa, Sorghum bicolor
  misc_feature (121)..(525): Pfam Name: PTR2 Pfam Description: POT family
  misc_feature: Ceres Annot ID no. 8642246
  misc_feature: Bit score of 1164.3 for HMM based on sequences of Figure 11
  misc_feature: Functional Homolog Of SEQ ID NO. 426
MDEAPGLLLQEEGGGRDHEPLLLPLPQDAGLYTGDGSVDVKGCPALKGTTGNWKACFFILGNECCERLAYYGIAKNLVTYLKVKLHLGNLEAARHVTTWQGTCYLTPLVGAILADSHWGKYWTIAVFSSVYFIGLAILTLSASVPALQPPSCLRTVCPEASLLQYGVFFVGLYMIALGTGGIKPCVSSFGADQFDDTDPAERAKKGSFFNWFYFCINIGAFISGTIIVWIQDNTGWGIGFAIPTIFMALAISFFLTASNKYRFQKPGGSPLTRVCQVVIAAFRKWHIEVPHDTSLLYEVDGQTSAIEGSRKLEHTNELEFLDRAAVISSADLKSESFTDPWKLCTVTQVEELKILIRMFPVWATTIIFSAVYAQNSSMFIEQGMVLDKRIGSFNIPPASLSTFDVISVIIWVPLYDRILVPVARKFTGREKGFSELQRMGIGLALSILAMVSAALVELKRLEIARSEGLIHEKAAVPMSILWQIPQYFLVGAAEVFTCIGQVEFFYDEAPDAMRSLCSAFALITVSLGSYISSIILTLVSCITTQGGDPGWIPDNLNEGHLDRFFWLIAGISFVNLIVYMGCAVRYRYKKAS

SEQ ID NO: 507 - DNA, 1764 bp, Sorghum bicolor
  misc_feature: Ceres Annot ID no. 8633032
  misc_feature: Encodes the peptide sequence at SEQ ID NO. 508
atggccggcgccgagcgcgcggaggcggtcgctctggaggaagggctcctcgctccggaggaatccaaccaagtagtatacactggagatggatcagtcgacttttcgggaaatcctgttgtcaaggaaacaacgggtagatggaaggcatgtccattcatattaggtaatgaatgctgtgaacgactggcctattatggcatctccacgaaccttgtcacttacttgacaaaaaagctacatgctggcaatgcctctgctgctagcaatgtgactacatggcagggaacttgctacttgactccgcttattggggcaatcctggctgatgcatactgggggaggtattggacgattgcaacattctccacagtatacttcatcgggatgtcaatactgactctttcagcatcagttcctatgctcatgcctccatcttgtgaaggatccttttgcccacaagcaagcccttttcagtatactgtatttttccttggtctttatctgattgccctgggtactggtggaattaagccttgtgtctcatcctttggagcggatcaatttgatgatacagatccagctgagcgaatccagaagggttctttctttaattggttctatttttcaataaacattggtgctctcatatcaagcagctttctggtttgggtgcaagacaatgtaggatggggactgggctttggcattccgactgtattcatggggctggcaatcataagtttcttctctggcacatcactttataggttccaaaaaccaggaggtagtcctattacacgagtatgccaggtgattgttgcctctttgcgcaagtggaatgtgcctgccccagaggacagctctctcttgtatgagctacctaatggggtatcaacaattgaggggagtcggcaaatagagcacacagatgaactcagatgtttagacaaggctgctacagttaccgaagttgatgtgaaaatggctgacttcagcaacccatggcggatatgcactgtcacccaggtggaagaactgaagatactagtaaggatgttccctgtctgggcaacaacaatagtgttttctgctgtatatgctcaaatgtcgacaatgttcgtggaacaagggatggtgcttgacccatcgttgggttctttcaagattcctccagcttcactgtctacctttgacaccctaagtgtcatcgtatgtgtcccgatgtacgattacattgtggttccaatagccaggagattcaccggcaacgagaggggctttacagagttgcagaggatgggcattggcctggtcatttccatccttgctatgtcggtcgctgcaatcctcgaaatcaagcggctagcagttgccagggaagcacacctggtggatcagaatgtcccggtcccactgagcatattctggcaaatccctcagtatttcctgattggtctagcagagattttcacattcatcggagcgcttgagttcttttatgaccagtcaccagacgccatgaggagcctctgcagtgcacttaatcttctcactactgcgggtgggaactatctcagcacgttcattttgacaatggtcgcgtactttactacgaggggaggtaaccctggatggattcctgacaacttgaacgaagggcatcttgattacttcttctggctccttgctggcctcagttttctgaacctgattgtatatgtcatctgtgctggcaaatacaagggcaagaaggcagcttga

SEQ ID NO: 508 - protein, 587 aa, Sorghum bicolor
  misc_feature (116)..(520): Pfam Name: PTR2 Pfam Description: POT family
  misc_feature: Ceres Annot ID no. 8633032
  misc_feature: Bit score of 1219.7 for HMM based on sequences of Figure 11
  misc_feature: Functional Homolog Of SEQ ID NO. 426
MAGAERAEAVALEEGLLAPEESNQVVYTGDGSVDFSGNPVVKETTGRWKACPFILGNECCERLAYYGISTNLVTYLTKKLHAGNASAASNVTTWQGTCYLTPLIGAILADAYWGRYWTIATFSTVYFIGMSILTLSASVPMLMPPSCEGSFCPQASPFQYTVFFLGLYLIALGTGGIKPCVSSFGADQFDDTDPAERIQKGSFFNWFYFSINIGALISSSFLVWVQDNVGWGLGFGIPTVFMGLAIISFFSGTSLYRFQKPGGSPITRVCQVIVASLRKWNVPAPEDSSLLYELPNGVSTIEGSRQIEHTDELRCLDKAATVTEVDVKMADFSNPWRICTVTQVEELKILVRMFPVWATTIVFSAVYAQMSTMFVEQGMVLDPSLGSFKIPPASLSTFDTLSVIVCVPMYDYIVVPIARRFTGNERGFTELQRMGIGLVISILAMSVAAILEIKRLAVAREAHLVDQNVPVPLSIFWQIPQYFLIGLAEIFTFIGALEFFYDQSPDAMRSLCSALNLLTTAGGNYLSTFILTMVAYFTTRGGNPGWIPDNLNEGHLDYFFWLLAGLSFLNLIVYVICAGKYKGKKAA

SEQ ID NO: 509 - protein, 570 aa, Vitis vinifera
  misc_feature (87)..(485): Pfam Name: PTR2 Pfam Description: POT family
  misc_feature: Public GI ID no. 157337654
  misc_feature: Bit score of 1166.2 for HMM based on sequences of Figure 11
  misc_feature: Functional Homolog Of SEQ ID NO. 426
MMGAFQFQGFITGNATGGWKSASLLLANQGLATLAFFGVGVNLVLFLTRVLSQDNANAANSVSKWTGTVYLCSLIGAFLSDSYWGRYLTCAIFQVILVLGLLLLSLSSWLFLIEPKGCGDRTTLCSPSSSVGLGVFYSSIYLVAFGYGGHQPTLATLGADQFDETNPREMNSKTVFFSYFYFALNLGSLFSNTILVYFEDSGKWTLGFLVSTGSAIIALVIFLCGSSGYRHIKPCGNPLPRVAQVFVAAFRKWDVVVPENGDGLYELEGSESAIKGSRKILHSNEIEFLDKAATMIEADMVDPNPWRLCTVTQVEEAKCVIKMLPIWLCTIIYSVIFTQMASLFVEQGDVMNRKIGNFEIPAASMSAFDIFSVLLCTGIYRQILVPISGKLTGNPKGMSELQRMGIGLIIGIAAMIAAGLTELGRLRRVSPNEEASSLSIFWQTPQYVLVGASEVFMYVGQLEFFNGQAPDGIKSLGSSLCMASISLGNYVSSLLVNIVMGVTTRGDNPGWIPEDLNTGHLDRFYFLIAVLTVIDFVIYVFCAKWYKSINLESFEKKKDQEDGHAVDEGK

SEQ ID NO: 510 - DNA, 1770 bp, Sorghum bicolor
  misc_feature: Ceres Annot ID no. 8642241
  misc_feature: Encodes the peptide sequence at SEQ ID NO. 511
atggagtcatcgctggaggaggagcggcggcagaacctgctgctgcgcgcgacggagccgccagaggatcttgccgttgccgggtacacaggtgatggatcagttgactttagaggttttcctattttaaagcataacacagggaactggagagcatgttcattgattcttggaactgaaatatgtgaacgtttggcctactatggaatctcaaaaagtttggtcacttacctttcaacaaggctacatgaaggaaatgtctctgctgcgaggaacttcacaacctggcaaggaacttgttatcttacaccacttattggagcaaccttagcagattcgtactggggaaagtacaggactattgctgttttctccactatttactttcttgggatggcggcattgacactttcagcatcagttccttctttccagccccctcaatgtgttgggtctatttgtccacaaccgaccttacctcagtaccttatatactttgttggattatacatgattgctttgggagctggtggtataaagccatgtgtttcgtcctttggggctgaccaattcgatgatactgatccagttgagaaaacaaagaaaggcgctttcttcaattggttttatttctgcataaatattggttctttgatctctggcacagttcttatttgggtacaagagaattatggatatggcattggatttgggatccctacttttttcattgccttggctattggaagcttttttataggttcagaaaggtatagatttcagataccgggaggaagcccacttacaagagcatgtcaggtagttgtggcagccactcacaagcgaaaagcggatttgccagttgacagttctcttctctatgagctagatggtaagacttcagctattgaggggagtcgtaagctggagcacagtagtgaattcagtttccttgacaaagctgcagtcgttttgtggaatgaacatgatggttctcgcaatccatggagactttgcacagtcacacaagttgaagagcttaaaatattactgaggatgtttccaatctgggcaacaggaattgtgttcttcaccgtatgtgctcaaaactcatcgatgttcatagaacaagggatggccctcgataaccaaattggttctttcaagattccagcagcaactctgtcatccctagatgttatcagtattgttgtttgggttccaatttatgagagattagttgtgcccatagccaggagattcagtggaaaagagagaggtttctcagaacttcaacggatgggaattggtctatttgtatctacagttgcagtggcagttgcagcattagtcgagatcaagcgtctgcaggtcgcaagagcagaggatctggttcatcagaaggtacctgttcctatgagcatcctttggcaagcaccacagtacttgctggttggcgtgggcgaggtgttcacatcaatcggtcaagctgagtttttctacaatcagtcaccagacgccatgagaagcctatgctcagctttcgctcttgttaccgtgtcacttggaagttatctcagctcattcatcttgaccctggtgtcatatttcacaactcgaaatgggcaattggggtggatccctgataacttaaacgaaggccatcttgaccgttttttctggctgatagctggtctcagctctttaaatttccttgtttttatatattacgctcaacaatacaagtgcaagagagcctctgttgcttaa

SEQ ID NO: 511 - protein, 589 aa, Sorghum bicolor
  misc_feature (118)..(520): Pfam Name: PTR2 Pfam Description: POT family
  misc_feature: Ceres Annot ID no. 8642241
  misc_feature: Bit score of 1075.0 for HMM based on sequences of Figure 11
  misc_feature: Functional Homolog Of SEQ ID NO. 426
MESSLEEERRQNLLLRATEPPEDLAVAGYTGDGSVDFRGFPILKHNTGNWRACSLILGTEICERLAYYGISKSLVTYLSTRLHEGNVSAARNFTTWQGTCYLTPLIGATLADSYWGKYRTIAVFSTIYFLGMAALTLSASVPSFQPPQCVGSICPQPTLPQYLIYFVGLYMIALGAGGIKPCVSSFGADQFDDTDPVEKTKKGAFFNWFYFCINIGSLISGTVLIWVQENYGYGIGFGIPTFFIALAIGSFFIGSERYRFQIPGGSPLTRACQVVVAATHKRKADLPVDSSLLYELDGKTSAIEGSRKLEHSSEFSFLDKAAVVLWNEHDGSRNPWRLCTVTQVEELKILLRMFPIWATGIVFFTVCAQNSSMFIEQGMALDNQIGSFKIPAATLSSLDVISIVVWVPIYERLVVPIARRFSGKERGFSELQRMGIGLFVSTVAVAVAALVEIKRLQVARAEDLVHQKVPVPMSILWQAPQYLLVGVGEVFTSIGQAEFFYNQSPDAMRSLCSAFALVTVSLGSYLSSFILTLVSYFTTRNGQLGWIPDNLNEGHLDRFFWLIAGLSSLNFLVFIYYAQQYKCKRASVA

SEQ ID NO: 512 - DNA, 1734 bp, Populus balsamifera subsp. trichocarpa
  misc_feature: Ceres Annot ID no. 1520085
  misc_feature: Encodes the peptide sequence at SEQ ID NO. 513
atgaacaaaaataatggactccacacaggagatggctcggtcgacattaatgggacggctgttcttaagcagaaaactggaaattggagagcatgctctttcatattgggaaatgaatgctgtgaacgcttggcctactatggaattgctactaatctggtctcctaccttactgggaagctacatgaaggaaatgtgtcagctgcaaaaaatgttaacatttgggcaggaacttgctacttcacaccactcattggagccactttggcagatgcttattggggaagatattggaccatttctgttttctccacaatttacttcattggaatgtgtacgttgactctctcagcaactattcctgtattaaagccagctgaatgtataggttctctatgccctccagcaactcctgctcagtatggggtattcttttttggcctctatctgattgcatttgggacaggtggcatcaaaccatgtgtttcatcctttggggcggatcagtttgatgacactgatcctaaggaaagggtaaagaaggggtccttcttcaattgtttctatttttcaatcaacattggttgtcttgtatcaagtagtttaatggtatacattcaagacaaagctgggtgggggctaggatttggaattcctgcattgttcatgggcatagctattgctatcttcttttcaggcacgcccctttatagatttcagaggccagtggggagcccaattactagaatgtgccaagttgtggttgcgtcattccataagaggaatttggaggttccccaagacattagtctcctatatgaaacccaagaaaaacactcaaccattgagggaacctggaaactagcgcacagcaatgaattgaaatgccttgataaagctgctataatttcagaggctgagataaaaggtggggacttcagtgatccatggaggctttgtactatgactcaggtggaggaattgaagattttgatccgcatgtttccgatctgggctacaggcattgtcttttctgctgcccatgcccaaatgagtacaatctttgtggaacaagggatgctgatggacaagacaattggttctttcaacatccctcctgcttctatgatcacaattgatgttattagtgttattttctgggttccaatctatgataggatcattgttccaattgcaaggaagttcactggcagagagaggggcttttcagagttgcagcgtatgggaattggcttgttcatttctatgctatcaatgacagctgctgctttgctagagattaagcgcttgcagcttgtaaaagagcttggattggttggtgatgctgttgcagttcctctcagtatcttgtggcaaattccccagtatatgttgatgggtacagcagagatctttacatccattggtcagcttgaatttttctatgaacagtctccagatgccatgcggagtctatgcagtgctttgtcactcctggctgcatctttgggtaattacctgagctcttttattctgagcatggtaacttacctcacaaccacgggtgggaagacaggatggataccagataacttaaataaggggcaccttgattatttattctggcttttggctgggctcagcttcttcaacttgctgatctacactatttgtgcaaagagatttataaagagaagaaggcctcctaaggtttttacaagaggggaggcctag

SEQ ID NO: 513 - protein, 577 aa, Populus balsamifera subsp. trichocarpa
  misc_feature (97)..(501): Pfam Name: PTR2 Pfam Description: POT family
  misc_feature: Ceres Annot ID no. 1520085
  misc_feature: Bit score of 1157.8 for HMM based on sequences of Figure 11
  misc_feature: Functional Homolog Of SEQ ID NO. 426
MNKNNGLHTGDGSVDINGTAVLKQKTGNWRACSFILGNECCERLAYYGIATNLVSYLTGKLHEGNVSAAKNVNIWAGTCYFTPLIGATLADAYWGRYWTISVFSTIYFIGMCTLTLSATIPVLKPAECIGSLCPPATPAQYGVFFFGLYLIAFGTGGIKPCVSSFGADQFDDTDPKERVKKGSFFNCFYFSINIGCLVSSSLMVYIQDKAGWGLGFGIPALFMGIAIAIFFSGTPLYRFQRPVGSPITRMCQVVVASFHKRNLEVPQDISLLYETQEKHSTIEGTWKLAHSNELKCLDKAAIISEAEIKGGDFSDPWRLCTMTQVEELKILIRMFPIWATGIVFSAAHAQMSTIFVEQGMLMDKTIGSFNIPPASMITIDVISVIFWVPIYDRIIVPIARKFTGRERGFSELQRMGIGLFISMLSMTAAALLEIKRLQLVKELGLVGDAVAVPLSILWQIPQYMLMGTAEIFTSIGQLEFFYEQSPDAMRSLCSALSLLAASLGNYLSSFILSMVTYLTTTGGKTGWIPDNLNKGHLDYLFWLLAGLSFFNLLIYTICAKRFIKRRRPPKVFTRGEA

SEQ ID NO: 514 - DNA, 1713 bp, Populus balsamifera subsp. trichocarpa
  misc_feature: Ceres Annot ID no. 1514979
  misc_feature: Encodes the peptide sequence at SEQ ID NO. 515
atggcagaggaggatgtttatacaaaagatggaactgtggattatctggggaatcctgctaacagaaaggagactggaacctggagggcctgcccttttattataggaaatgaattttgtgaacgattggcgtactatgggatgagctccaatctggttctttatttcaagcacagactgaaccagagcagtgctacagctactagaaataacttgaactggggtggaacatgctatctcactccattgatcggagcattcgttgctgatgcttatctaggaagatattggacgattgctagtttctcaaccatttatgttgcagggatgacgcttttgacaatgtcagcaactgtccatggcctcaggccagaatgttattcaaaagatcattgccatccaacaggtggtcaaactgctgtaactttcgtagcactttacctgatagcacttggcacaggaggtattaagccttgtgtctcatcctatggagcagatcagtttgatgatgctgacgaaactgagaagaaacacaagagttcattctttaactggttctacctctcgattaatgttggtgctcttattgccggttctgtgctggtttggatacaagataatgtgagttggggatggggttttggcattccagcaatagccatggcaattgctgttgtgagcttcttttcaggtaccaagttgttcaggtatcaaaagcctggaggcagccctcttacacgcatctgtcaggtgctggtggcatccttcagaaaacagaaagttgaagttcctgctgacaagtctctgttgcatgagactgcagatgccgaatccaacatcaaaggaagccgcaagctcgaccatactgaagaatttagtttccttgacaaggcagcagtagaaacagaaaaggacgacataaaagggacaggagacccatggaatctttgcacagtaacccaggtcgaggagctaaaggctatcattcggttgcttcctatatgggccactggtatcatcttttctgcagtgtacagccaaatggggaacttatttgtgctgcaaggtgaaacaatggataaatttgttggaaactccactttcgagataccatctgcatctttatccatctttgacacccttagtgtcattttttgggtccctgtgtatgaccgaattatcgtcccagttgcaagaaaattcactggacataaaaacggcttaactcaactgcagcggatgggcattggtctattcatatcaatatttgccatggtatctgcagcaatcttggaacttaaaagactgcaaatggtgagaaataacaactactacgaacttgattccgtgcccatttctatattttggcaagttccacagtatttcctgataggctgtgccgaagttttcacgttcatcggacaattggaattcttctacgaacaagcacctgatgcaatgaggagcatgtgttctgccctgtcactcaccaccgtcgcacttggcaattacttaagctctcttctggtaaccattgttacaaccatcagcactaagaatggaaaggctggatggattccggacaacttaaattacggtcacattgattacttcttctggctactaggaatgctcagtgtgctgaatttaggtgcctttctcttgatctcaaattggtacacttataaaaaggctataggaactcttcgttga

SEQ ID NO: 515 - protein, 570 aa, Populus balsamifera subsp. trichocarpa
  misc_feature (96)..(499): Pfam Name: PTR2 Pfam Description: POT family
  misc_feature: Ceres Annot ID no. 1514979
  misc_feature: Bit score of 1132.8 for HMM based on sequences of Figure 11
  misc_feature: Functional Homolog Of SEQ ID NO. 426
MAEEDVYTKDGTVDYLGNPANRKETGTWRACPFIIGNEFCERLAYYGMSSNLVLYFKHRLNQSSATATRNNLNWGGTCYLTPLIGAFVADAYLGRYWTIASFSTIYVAGMTLLTMSATVHGLRPECYSKDHCHPTGGQTAVTFVALYLIALGTGGIKPCVSSYGADQFDDADETEKKHKSSFFNWFYLSINVGALIAGSVLVWIQDNVSWGWGFGIPAIAMAIAVVSFFSGTKLFRYQKPGGSPLTRICQVLVASFRKQKVEVPADKSLLHETADAESNIKGSRKLDHTEEFSFLDKAAVETEKDDIKGTGDPWNLCTVTQVEELKAIIRLLPIWATGIIFSAVYSQMGNLFVLQGETMDKFVGNSTFEIPSASLSIFDTLSVIFWVPVYDRIIVPVARKFTGHKNGLTQLQRMGIGLFISIFAMVSAAILELKRLQMVRNNNYYELDSVPISIFWQVPQYFLIGCAEVFTFIGQLEFFYEQAPDAMRSMCSALSLTTVALGNYLSSLLVTIVTTISTKNGKAGWIPDNLNYGHIDYFFWLLGMLSVLNLGAFLLISNWYTYKKAIGTLR

SEQ ID NO: 516 - protein, 587 aa, Vitis vinifera
  misc_feature (113)..(521): Pfam Name: PTR2 Pfam Description: POT family
  misc_feature: Public GI ID no. 147858202
  misc_feature: Bit score of 1351.3 for HMM based on sequences of Figure 11
  misc_feature: Functional Homolog Of SEQ ID NO. 426
MASMACLNIFQKGRGKTRNEQEECTFDGSVDRHGHPAVRARTGNWVTAILILVNQGLATLAFFGVGVNLVLFLTRVLGQDNATAANNVSKWTGTVYIFSLLGAFLSDSYWGRYKTCAIFQVIFVIGLVLLSLSSYIFLLKPNGCGDKEFPCGSHSTFEISFFYLSIYLIALGNGGYQPNIATFGADQFDEDNPKESHSKVAFFSYFYLALNLGSLFSNTILGYFEDGGRWVLGFWASSASAILALILFLFGIPRYRHFKPSGNPLSRFCRVVVAATRKWKVEMPPEGEDLYEVDGDDCSGNCRRKMLHTQGFKFLDKAAVLTAKEREQEDKESRSPWRICTVTQVEEVKCILRLLPIWLCTILYSVVFTQMASLFVEQGAAMKTTLLGFHIPPASMSSFDIVSVAAFIFIYRRVLDPLVARLKGTKARGLTELQRMGIGLIIAIIAMVAAGIVEWFRLKYAKKDCRQCESESSLSIFWQIPQYVLIGASEVFMYVGQLEFFNDQAPDGLKSFGSALCMTSISLGNYVSSLLVTIVMKFSTRDQMPGWIPSNLNKGHLDRFYFLLAALTMADFGVYIICAKVVTSPSS

SEQ ID NO: 517 - protein, 574 aa, Oryza sativa subsp. indica
  misc_feature (122)..(507): Pfam Name: PTR2 Pfam Description: POT family
  misc_feature: Public GI ID no. 125545538
  misc_feature: Bit score of 1153.0 for HMM based on sequences of Figure 11
  misc_feature: Functional Homolog Of SEQ ID NO. 426
MAEVTVVRAEREEESTLEQGLLAIPEESNQLTYTGDGSVDFSGNPVVKERTGRWRACPFILGNECCERLAYYGISTNLVTYLTKKLHDGNASAASNVTAWQGTCYLTPLIGAILADAYWGRYWTIATFSTIYFIGMAVLTLSASVPTFMPPPCEGSFCPPANPLQYTVFFLGLYLIALGTGGIKPCVSSFGADQFDDTDPVERIQKGSFFNWFYFSINIGALISSSFLVWVQDNIGWGIGFGIPTIFMGLAIISFFSGTSLYRFQKPGGSPITRVCQVVVASFRKWNVHVPEDSSRLYELPDGASAIEGSRQLEHTDELRCLDKAATITDLDVKADSFTNPWRICTVTQVEELKILMSTMFVEQGMMLDTSVGPFKIPPASLSTFDVVSVIIWVPLYDSILVPIARRFTGNPRGFTELQRMGIGLVISIFSMAAAAVLEIKRLDIARAEHLVDQNVPVPLNICWQIPQYFLVGASEVFTFVGSLEFFYDQSPDAMRSLCSALQLVTTALGNYLSAFILTLVAYFTTRGGNPGWIPDNLNQGHLDYFFWLLAGLSFLNFVIYVICANKYKSKKAA

SEQ ID NO: 518 - protein, 591 aa, Oryza sativa subsp. japonica
  misc_feature (121)..(525): Pfam Name: PTR2 Pfam Description: POT family
  misc_feature: Public GI ID no. 115451771
  misc_feature: Bit score of 1131.5 for HMM based on sequences of Figure 11
  misc_feature: Functional Homolog Of SEQ ID NO. 426
MEEAAEDRRLQVREEGGDQEPLLLLPQDANLYTGDGSVDIKGRPALKHATGNWRACFFILGDECCERLAYYGIAKNLVTYLKTNLHQGNLEAARNVTTWQGTCYLTPLIGALLADSYWGKYWTIAAFSAIYFIGLVALTLSASVPALQPPKCSGSICPEASLLQYGVFFSGLYMIALGTGGIKPCVSSFGADQFDDSDPADRVKKGSFFNWFYFCINIGAFVSGTVIVWIQDNSGWGIGFAIPTIFMALAIASFFVASNMYRFQKPGGSPLTRVCQVVVAAFRKWHTEVPHDTSLLYEVDGQTSAIEGSRKLEHTSELEFFDKAAIISSDDAKSDSFTNPWRLCTVTQVEELKILIRMFPIWATTIIFNAVYAHNSSMFIEQGMVLDKRVGSFIVPPASLSTFDVISVIIWIPFYGRVLVPIARKFTGREKGFSELQRIGIGLALSILAMLSAALVELRRLGIARSEGLIHEDVAVPMSILWQIPQYFLVGAAEVFAAIGQVEFFYNEAPDAMRSLCSAFALVTVSLGSYLSSIILTLVSYFTTQGGDPGWIPDNLNEGHLDRFFSLIAGINFVNLLVFTGCAMRYRYKKA

SEQ ID NO: 519 - protein, 574 aa, Oryza sativa subsp. japonica
  misc_feature (122)..(507): Pfam Name: PTR2 Pfam Description: POT family
  misc_feature: Public GI ID no. 125587732
  misc_feature: Bit score of 1153.1 for HMM based on sequences of Figure 11
  misc_feature: Functional Homolog Of SEQ ID NO. 426
MAEVTVVRAEPQEGSTLEQGLLAIPEESNQLTYTGDGSVDFSGNPVVKERTGRWRACPFILGNECCERLAYYGISTNLVTYLTKKLHDGNASAASNVTAWQGTCYLTPLIGAILADAYWGRYWTIATFSTIYFIGMAVLTLSASVPTFMPPPCEGSFCPPANPLQYTVFFLGLYLIALGTGGIKPCVSSFGADQFDDTDPVERIQKGSFFNWFYFSINIGALISSSFLVWVQDNIGWGIGFGIPTIFMGLAIISFFSGTSLYRFQKPGGSPITRVCQVVVASFRKWNVHVPEDSSRLYELPDGASAIEGSRQLEHTDELRCLDKAATITDLDVKADSFTNPWRICTVTQVEELKILMSTMFVEQGMMLDTSVGPFKIPPASLSTFDVVSVIIWVPLYDSILVPIARRFTGNPRGFTELQRMGIGLVISIFSMAAAAVLEIKRLDIARAEHLVDQNVPVPLNICWQIPQYFLVGASEVFTFVGSLEFFYDQSPDAMRSLCSALQLVTTALGNYLSAFILTLVAYFTTRGGNPGWIPDNLNQGHLDYFFWLLAGLSFLNFVIYVICANKYKSKKAA

SEQ ID NO: 520 - DNA, 1755 bp, Populus balsamifera subsp. trichocarpa
  misc_feature: Ceres Annot ID no. 1516968
  misc_feature: Encodes the peptide sequence at SEQ ID NO. 521
atggctaagattaacaagtatccagtccttgtcagtttcgtattatatttccaggatgaaagcaatggactctacacaggagatggctcagttgacattaatgggaaccctgtccttaagcagaaaactggaaactggaaagcatgccctttcatactgggtactgaatgttgtgaacgcctggcctactatgggattgctactaatctcgtcacttaccttaccaagaagctacatgaaggaaatgtgtcggctgcaagaaatgttaccacctggtcagggacatgctatcttacacccctcatcggagctgtattagcagatacttgttggggaagatattggactattgctgctttctcctcaatttacttcattggaatgtgtgcgttgactctctcagcatctattcctgcattaaagccagctgaatgcgtaggttctctgtgccctccagcaactccagctcagtatgcagtattcttttttggcctctatctgattgcgcttgggacgggtggcatcaaaccatgtgtttcatcctttggggcagatcaatttgatgacactgatcccaaggaacgggtaaagaagggatctttcttcaattggttctatttttcaatcaatattggtgctcttatatcaagtagttttctggtatatattcaagacaatgccggttggggactaggatttggaattcctgcactgttcatgggcatagctattgctagcttcttttcaggcacacccctttacagatttcaaagaccaggggggagccctattacaaggatgtgccaagttttggttgcatcattccataagtggaatctggaggttcctctagacagtagcctcctgtatgaaacacaagacaaacactctgccattgaaggaagccggaaactggtgcacagcgatgaactaaagtgccttgataaagctgctgtgctgtcagaggctgagatgaaaagtggggacttccccaacccttggaggctttgtactgtcacgcaggtggaggaattgaagattttgatccgcatgtttccaatctgggctacaggaattgtcttttccgctgtgtatgcccagatgtctactatgtttgtggaacaagggatgctgatggacacgacaattggttctttcacaattcctccagcatctctgtcatcctttgatgttattagtgttatttgctgggtgccaatctatgataggattgttgttcccattgcaaggaagttcacaggaaaagagaggggcttctcagatttgcagcgtatgggaattggcctgttcatttcagtgttatcaatgacagctgctgctttggtggagattaagcgcctacagcttgcgaaagagcttggcttggctggtgaagctgttgcagtgcctatcagtattttttggcagatcccccaatatatgttggtaggtgcttcagaagtttttacattcattggtcagattgaattcttctatgaagaatctccagatgcaatgcggagtttatgcagtgcgttgtcactcctgactacgtctttgggtaattacttgagctcttttattctgactatggtaacttacttcacaaccacgggtgggaagccaggatggatccccgataacttgaatgagggccacctcgattatttcttctggcttttagctggactcagcgttctcaacatgctggtctatgttttctgtgcgaggaaatataagcagaaggcctcctaa

SEQ ID NO: 521 - protein, 584 aa, Populus balsamifera subsp. trichocarpa
  misc_feature (114)..(518): Pfam Name: PTR2 Pfam Description: POT family
  misc_feature: Ceres Annot ID no. 1516968
  misc_feature: Bit score of 1250.0 for HMM based on sequences of Figure 11
  misc_feature: Functional Homolog Of SEQ ID NO. 426
MAKINKYPVLVSFVLYFQDESNGLYTGDGSVDINGNPVLKQKTGNWKACPFILGTECCERLAYYGIATNLVTYLTKKLHEGNVSAARNVTTWSGTCYLTPLIGAVLADTCWGRYWTIAAFSSIYFIGMCALTLSASIPALKPAECVGSLCPPATPAQYAVFFFGLYLIALGTGGIKPCVSSFGADQFDDTDPKERVKKGSFFNWFYFSINIGALISSSFLVYIQDNAGWGLGFGIPALFMGIAIASFFSGTPLYRFQRPGGSPITRMCQVLVASFHKWNLEVPLDSSLLYETQDKHSAIEGSRKLVHSDELKCLDKAAVLSEAEMKSGDFPNPWRLCTVTQVEELKILIRMFPIWATGIVFSAVYAQMSTMFVEQGMLMDTTIGSFTIPPASLSSFDVISVICWVPIYDRIVVPIARKFTGKERGFSDLQRMGIGLFISVLSMTAAALVEIKRLQLAKELGLAGEAVAVPISIFWQIPQYMLVGASEVFTFIGQIEFFYEESPDAMRSLCSALSLLTTSLGNYLSSFILTMVTYFTTTGGKPGWIPDNLNEGHLDYFFWLLAGLSVLNMLVYVFCARKYKQKAS

SEQ ID NO: 522 - DNA, 2468 bp, Zea mays
  misc_feature: Ceres Clone ID no. 350844
  misc_feature: Encodes the peptide sequence at SEQ ID NO. 523
atgatcggagctctataaatcgccccaaccccctccctcgttctgccaccattgccatatcctcgatcacaagagcagctactagctgcctctagctcgatcggttagtttgtcgtgttgcttacgtacgtcagcagaggccatcgtcgagtgtatccagtggtcgagaagagggaagaaatgtctgcgaacgacggcgccggcgacacgaagatgagggcgatcgtcgtcgtagaggaaggggagatgagcgcgccggcggcgacgccgaagcagggcaagtgctgcgagtacacgctggacggctccgtcgacatgaagggccggccggcggtcaaggggaaatcaggagggtggcttgccggtgctctaatcctcgtgaaccagggcctggcgacgctggctttcttcggcgtgaacgtgaacctggtgctgttcctgacccgggtgctggggcagagcaatggcgacgccgccaacaacgtcagcaagtggacgggcaccgtgtacatgttctccctcatcggcgccttcctcagcgactcctattggggacgctacaagacctgcgccatcttccaggccatctttgtcctcggcctcgcgctgctgtcggtgtcgtcgcacctctacctaatcaggccggacgggtgcggcatggagcacgcgccctgcggcccgcactccggcaaggagctggggatcttctacatcgcgctgtacatgatcgccttcggcaacggcgggtaccagcccaacatcgccaccctgggcgccgaccagttcgacgaggaggaccccgccgaggcgcactccaaggtctccttcttcagctacttctacctcgccctcaacctcggctcgctcttctccaacaccttcctcagctacctcgaggacaagggcagctgggcgctcggcttctgggcctccaccgccgccgccgccacagcgctcctgcttttcctcagcggcacgctccggtaccgctatttccagcccggagggaacccgatcggaaggattggccaggtcgccatcgccgcgtgcaggaactggaaggcgggcgtgtcgaccgaagtggtaagcctgtacgagggcgacgagaaggcggatgccggtggcaggaagcttctgcacacgcaagggttcagtttcttggaccgcgcggcgcacgcggacactgactccaagctcggcgcgcgcgatccctggaagctgtgctcggtgacgcaggtggaggaggtcaagagcatcctgaggctcctccccatctggctctgcaccatcctctactccgttgtcttcacccagatggcctcgctctttgtcgtgcagggcgccgcgatgcgccgcaccaccccgttctccggcttctccgtcccgccctccagcatgtcggccttcgacattctcacagtcgccgccacgattttcctgtaccgccgcactatctgcccgttcctagcgcggctcagcggccgcccggctggccccaccgagctgcagaggatgggcctcggcctggtcgtgggtgccctggccatgaccacggccgggacggtcgagcacttccggaaggccagggccaccgcagcgatgagcagcgacctgcatatcatgtggcaggtgccgcagtatgcgctgatcggcgtgtcggaggtgatgatgtacgtcgggcagctcgagttcttcaacggccagatgcccgacgggctcaaaagcttcggaagtgccttgtgtatgatgtccatgtcgctcggcaactacttcagtgacatcatcgtgagcgcggtgaccaggctcaccacgacgcgagggcggtccgggtggatcccggctgacctcaacgaggggcacctcgacaagttctacttcctgctcgccgtgctggccgtcgcggacttcgcggtgtacctcgtatgcgcgagccgctacgggagcggcaaagtggacgggaggagcagcgacgacgaggaggagggagcggccggtcaggtgacatccccggcttacgcatgaccatcaccggccgcccggccggcgggcatcgtacgtatgttgttcttgtcttcttgaggtggaggctggcaggctgcaaatctcgagggccattggttatttggttgacggagttcttccattgacgacgatagcacaagcatggggcgagcatggacatagtgatatgactaattaaagaataagcacttaagcaggactagctaaacactacatgctgcagcatcatgctcgcggtttttggccagtgtaacaacagacgacgattgttactgaccacgactgttctttgcgtggtctacagagttcgcttctgcaaaattcaataatgggcgagtgctgtatcatataaagtcgcaggttgcgccacgtagctacgatgtgactaacaaacaaatatgtattcaagttatgtattaaacggttaaccgtgtctttttaccgtt

SEQ ID NO: 523 - protein, 613 aa, Zea mays
  misc_feature (127)..(525): Pfam Name: PTR2 Pfam Description: POT family
  misc_feature: Ceres Clone ID no. 350844
  misc_feature: Bit score of 1244.1 for HMM based on sequences of Figure 11
  misc_feature: Functional Homolog Of SEQ ID NO. 426
MSANDGAGDTKMRAIVVVEEGEMSAPAATPKQGKCCEYTLDGSVDMKGRPAVKGKSGGWLAGALILVNQGLATLAFFGVNVNLVLFLTRVLGQSNGDAANNVSKWTGTVYMFSLIGAFLSDSYWGRYKTCAIFQAIFVLGLALLSVSSHLYLIRPDGCGMEHAPCGPHSGKELGIFYIALYMIAFGNGGYQPNIATLGADQFDEEDPAEAHSKVSFFSYFYLALNLGSLFSNTFLSYLEDKGSWALGFWASTAAAATALLLFLSGTLRYRYFQPGGNPIGRIGQVAIAACRNWKAGVSTEVVSLYEGDEKADAGGRKLLHTQGFSFLDRAAHADTDSKLGARDPWKLCSVTQVEEVKSILRLLPIWLCTILYSVVFTQMASLFVVQGAAMRRTTPFSGFSVPPSSMSAFDILTVAATIFLYRRTICPFLARLSGRPAGPTELQRMGLGLVVGALAMTTAGTVEHFRKARATAAMSSDLHIMWQVPQYALIGVSEVMMYVGQLEFFNGQMPDGLKSFGSALCMMSMSLGNYFSDIIVSAVTRLTTTRGRSGWIPADLNEGHLDKFYFLLAVLAVADFAVYLVCASRYGSGKVDGRSSDDEEEGAAGQVTSPAYA

SEQ ID NO: 524 - DNA, 1746 bp, Sorghum bicolor
  misc_feature: Ceres Annot ID no. 8658700
  misc_feature: Encodes the peptide sequence at SEQ ID NO. 525
atgggagaggtcgcggacatgtacacccaagacgggacggtggacaggaaggggaatcccgccctgaagaaggacaccggcaactggagggcatgcccctacatcctcgcgaacgagtgctgcgagaggctggcctactatggcatgagcaccaaccttgttcactacatgaagacccggcttggccaggtgaacagcgtcgcctccaacaacgtcaccaactggtcagggacgtgctacatcacgccactcatcggcgccttcttcgccgacgcgtacctggggaggttctggaccatcgccagcttcatggtcatctacattttcggactggcgctgctgacgatggcgtcgtcggtgaaggggctggtgcctacgtcgtgtgacaatgacggcgtgtgccacccgacggacgcgcagtcggcggtggtgttcgtggcgctgtacctgatcgcgctgggaacgggcgggatcaagccctgcgtgtcctccttcggcgccgaccagttcgacgagaacgacgagcgggagaagaagagcaagagctccttcttcaactggttctacttctccatcaacatcggcgcgctggtggcgtccacggtgctggtgtacgtgcagacgcacatcggctggggctggggcttcggcatccccgccgtggtcatggccatcgccgtcgtcagcttcttcgtgggcacgccgctgtacaggcaccagaagcccggtggcagcccgctgacgcgcatcgcgcaggtgctcgtcgcgtgcgcgcgcaagtggaacgtggccgtgcccgccgacaagtcgcgcctccacgagacgctggacaaggagtccggcatcgagggcagccgcaagctggagcacacggaccagctcgcgtgcctcgacagggctgccgtcgtgacggccgaggacagcgccgcgggggcggcgacggcgacgagcccgtggcgcctgtgcacggtgacgcaggtggaggagctcaagagcgtgatccggctgctccccatctgggcgagcgggatcgtgttcgcggcggtgtactcgcagatgagcaccatgttcatcctccagggcgacacgctggaccagcgcatggggtccaagttcaagatcccctcggcgacgctctccatggtggacaccatcagcgtcatcttctgggtgcccgtctacgaccgcgtcatcgtgcccgtcgtgcgctcctacaccggccgtccccgagggttcacgcagctgcagcggatgggcatcggcctcgtcgtctccatcttctccatggtggcggcgggcgtgctggacatcgtgcggctgaacgccgtggcgcggcacggcctgtacggcaaggacgaccacgtgcccatctccatcttctggcagataccgcagtacttcatcatcgggtgcgcggaggtgttcaccttcgtggggcagctggagttcttctacgaccaggcgcccgacgccatgaggagcatgtgctccgcgctgtcgctcaccaccgtcgcgctcggcaactacctcagcacggtgctggtgaccatcgtcacgcacatcaccaccaggaacggcaacatcgggtggatcccggagaacctcaaccggggccacctcgactacttcttctggctgctcgccgtgctcagcctcctcaacttcctcgtctacctcgtcatcgccacctggtacaagtacaagaagacggccgatgatatcccggacgccaaaggggagcactga

SEQ ID NO: 525 - protein, 581 aa, Sorghum bicolor
  misc_feature (97)..(504): Pfam Name: PTR2 Pfam Description: POT family
  misc_feature: Ceres Annot ID no. 8658700
  misc_feature: Bit score of 1207.1 for HMM based on sequences of Figure 11
  misc_feature: Functional Homolog Of SEQ ID NO. 426
MGEVADMYTQDGTVDRKGNPALKKDTGNWRACPYILANECCERLAYYGMSTNLVHYMKTRLGQVNSVASNNVTNWSGTCYITPLIGAFFADAYLGRFWTIASFMVIYIFGLALLTMASSVKGLVPTSCDNDGVCHPTDAQSAVVFVALYLIALGTGGIKPCVSSFGADQFDENDEREKKSKSSFFNWFYFSINIGALVASTVLVYVQTHIGWGWGFGIPAVVMAIAVVSFFVGTPLYRHQKPGGSPLTRIAQVLVACARKWNVAVPADKSRLHETLDKESGIEGSRKLEHTDQLACLDRAAVVTAEDSAAGAATATSPWRLCTVTQVEELKSVIRLLPIWASGIVFAAVYSQMSTMFILQGDTLDQRMGSKFKIPSATLSMVDTISVIFWVPVYDRVIVPVVRSYTGRPRGFTQLQRMGIGLVVSIFSMVAAGVLDIVRLNAVARHGLYGKDDHVPISIFWQIPQYFIIGCAEVFTFVGQLEFFYDQAPDAMRSMCSALSLTTVALGNYLSTVLVTIVTHITTRNGNIGWIPENLNRGHLDYFFWLLAVLSLLNFLVYLVIATWYKYKKTADDIPDAKGEH

SEQ ID NO: 526 - protein, 559 aa, Vitis vinifera
  misc_feature (96)..(488): Pfam Name: PTR2 Pfam Description: POT family
  misc_feature: Public GI ID no. 157346088
  misc_feature: Bit score of 1129.5 for HMM based on sequences of Figure 11
  misc_feature: Functional Homolog Of SEQ ID NO. 426
MAEEDIYTKDGTIDFRSNPAVKKETGTWKACPYILGNECCERLAYYGINTNLVNYLKFQLNQRNVVAINNVTNWSGTCYVTPLLGAFLADAYLGRYWTIAGFSIIYVFGMTLLTLSASAHGLKPLCDGQNVCYPTGLQTAVFFVGLYLIALGTGGIKPCVSSFGADQFDDSDETERKSKSSFFNWFYFSINIGALLASSVLVWVQTNVGWGWGFGIPAVAMGIAVMSFFSGTRLYRNQKPGGSPLTRICQVIVASLRKFQVEVPADKCLLYETADSESAVTGSRKLDHTKHLSFFDKAAVETHIDAIKGSVDSWRLCTVTQVEELKSIIRLLPIWATGIVFSAVYSQMGTLFVLQGNTMDLHITGSFQIPSASLSLFDTISVIFWVPIYDRLIVPFARKFTGHKSGFTQLQRIAIGLVISIFAMLVAGTLELLRLRMHIPMSIFWQVPQYFIIGCAEVFTFIGQLEFFYEQAPDAMRSLCSALSLTTAALGNYLSTLLVNVVTDVSTRGGKPGWIPDNLNYGHLHYFFWLLAALSVFNLGVYLQVARWYTYKRTAVDSL

SEQ ID NO: 527 - DNA, 2110 bp, Gossypium hirsutum
  misc_feature: Ceres Clone ID no. 1926916
  misc_feature: Encodes the peptide sequence at SEQ ID NO. 528
aacattccactccttcagcttgtgttaatatctaatcaaccaaattttaaggatcccagaacttctttttctttttcctttttgttaaaagattccaaaagttgttgacattaccaatctaacaagttgcaaaacaatcatgggatctatggatgaagagagatcgcttttggaagctgaacttaatcaggctgaaagcagtgggctttacactggggatggctccgttgacttcaatgggaatcctattttgaagcagaatactggaaattggagagcgtgccctttcattttgggtaatgaatgctgtgagagattggcttattatgggatagcaactaatcttgtaagttacctgaccaagaaactgcatgaagggaatgtatcagctgcaagaaatgtaactacttggcaaggaacttgctaccttacacctctcattggagccgtcttagcagatgcatattggggaagatattggacaattgctgctttctccactatttacttcttcggaatgtgtacattgactctctcagcatcaattcctgcactgaaacctgctgaatgtgtgggttctatttgtccctcagctactccagctcagtatgctgtatttttctttgggctttatctgattgcattagggacgggtggaatcaaaccgtgtgtttcatcctttggggccgatcagtttgatgatactgatcccaatgaaagggtgaagaaggggtcctttttcaactggttctatttttccatcaacattggtgctctgatctcaagcagtcttctggtgtggattcaggacaatgctggatggggtcttggatttggcattccagcattgtttatgggccttgcaattggaagttttttctcaggcacggcactctatagatttcaaagaccaggaggaagccctattacaagaatgttccaggttttggttgcagcatttcataaacggagcctcaaggtacctgaagacagtactctcctatatgaaactggtgacaagcactctgccatagaaggaagtcggaaactagagcacagtgaggagttgaagtgcctagataaagctgccatagtcactgatgttgaaaccaaaagtggggacttctcaaatccttggaggctttgcactgtaacacaagtggaggaattgaaaatcttgatccgcatgtttcccatatgggctactggaattgtgttctctgctgtatatgctcaaatgtcaactatgtttgtggaacaagggatgatgatggacacaaaaattggttctttcactattcctcctgcttctctctcaacttttgatgttattagtgttattttttgggtccccatctatgataggatcattgtcccaattgcaagaaagttcacacgtaaggagcgaggcttctcagagttgcagcgtatgggaattggtctttttatttcagtcctatgcatgtcagccgcagctgtggtggagaccaggagattgcaccttgctaaagagctagatttggtcgataagcaggtcgctgtacccattagtattctttggcaaatacctcaatatttcttgttgggtgccgcagaggtctgcacatttatcggacagcttgagttcttctatgatcagtcccctgatgccatgcggagtttatgtagtgcgctttcacttctgactacatctttaggcaattacctgagttcttttattctaactcttgtaacttacttcacaacaaagggtggccagattggttggatatcggacaaccttaacgagggtcatctcgactatttcttctggctcttggctggtctcagcttcttaaacatgttggtgtataccctttgtgcttcgaggtacaagcagaagaaggcttcctaaagttccttctcatatggagagaaattaagctgaaatgttgttatagataaaaactgtatgcatctcaatacagggacatccttccactttggaaaccaactatcttgtatcttattgggttatattcattttctagctgattctcgcatattgtacattaatactgcatggttttcaattatttgccatccttaaatgtcggattaaattgtttgc

SEQ ID NO: 528 - protein, 584 aa, Gossypium hirsutum
  misc_feature (113)..(517): Pfam Name: PTR2 Pfam Description: POT family
  misc_feature: Ceres Clone ID no. 1926916
  misc_feature: Bit score of 1251.4 for HMM based on sequences of Figure 11
  misc_feature: Functional Homolog Of SEQ ID NO. 426
MGSMDEERSLLEAELNQAESSGLYTGDGSVDFNGNPILKQNTGNWRACPFILGNECCERLAYYGIATNLVSYLTKKLHEGNVSAARNVTTWQGTCYLTPLIGAVLADAYWGRYWTIAAFSTIYFFGMCTLTLSASIPALKPAECVGSICPSATPAQYAVFFFGLYLIALGTGGIKPCVSSFGADQFDDTDPNERVKKGSFFNWFYFSINIGALISSSLLVWIQDNAGWGLGFGIPALFMGLAIGSFFSGTALYRFQRPGGSPITRMFQVLVAAFHKRSLKVPEDSTLLYETGDKHSAIEGSRKLEHSEELKCLDKAAIVTDVETKSGDFSNPWRLCTVTQVEELKILIRMFPIWATGIVFSAVYAQMSTMFVEQGMMMDTKIGSFTIPPASLSTFDVISVIFWVPIYDRIIVPIARKFTRKERGFSELQRMGIGLFISVLCMSAAAVVETRRLHLAKELDLVDKQVAVPISILWQIPQYFLLGAAEVCTFIGQLEFFYDQSPDAMRSLCSALSLLTTSLGNYLSSFILTLVTYFTTKGGQIGWISDNLNEGHLDYFFWLLAGLSFLNMLVYTLCASRYKQKKAS

SEQ ID NO: 529 - protein, 585 aa, Arabidopsis thaliana
  misc_feature (113)..(517): Pfam Name: PTR2 Pfam Description: POT family
  misc_feature: Public GI ID no. 15226861
  misc_feature: Bit score of 1180.1 for HMM based on sequences of Figure 11
  misc_feature: Functional Homolog Of SEQ ID NO. 426
MGSIEEEARPLIEEGLILQEVKLYAEDGSVDFNGNPPLKEKTGNWKACPFILGNECCERLAYYGIAGNLITYLTTKLHQGNVSAATNVTTWQGTCYLTPLIGAVLADAYWGRYWTIACFSGIYFIGMSALTLSASVPALKPAECIGDFCPSATPAQYAMFFGGLYLIALGTGGIKPCVSSFGADQFDDTDSRERVRKASFFNWFYFSINIGALVSSSLLVWIQENRGWGLGFGIPTVFMGLAIASFFFGTPLYRFQKPGGSPITRISQVVVASFRKSSVKVPEDATLLYETQDKNSAIAGSRKIEHTDDCQYLDKAAVISEEESKSGDYSNSWRLCTVTQVEELKILIRMFPIWASGIIFSAVYAQMSTMFVQQGRAMNCKIGSFQLPPAALGTFDTASVIIWVPLYDRFIVPLARKFTGVDKGFTEIQRMGIGLFVSVLCMAAAAIVEIIRLHMANDLGLVESGAPVPISVLWQIPQYFILGAAEVFYFIGQLEFFYDQSPDAMRSLCSALALLTNALGNYLSSLILTLVTYFTTRNGQEGWISDNLNSGHLDYFFWLLAGLSLVNMAVYFFSAARYKQKKASS

SEQ ID NO: 530 - DNA, 2216 bp, Triticum aestivum
  misc_feature: Ceres Clone ID no. 816960
  misc_feature: Encodes the peptide sequence at SEQ ID NO. 531
aaaatccaaaggtggctgtggctgtggctcacacacacacacacagagagagacaagagacagcgagtcacagaccgagggagggggagctcagaccaggccagcgggaatcgcgcgcgcgggccgggcgacgactgaggcggagatcccttccgaccggccgccgccgccgctcgtcgacaccgaccaacagaggaagcagttcctctgagttgctgcagcgcgtagtctgagagacaagcaagtacagcagccatgggggaggtcgcggcggagctgtacacccaggatggcaccatcgacatcaagggcaacccggccctcaagagcaacaccggcaactggcgagcatgcccctacatcctcgcgaacgagtgctgcgagcgccttgcctactacggcatgagcaccaacctggtcaacttcatgaaggaccggatgggcatggccaacgcggcggccgccaacaacgtcaccaactggggcggcacctgctacatcaccccgctcatcggcgccttcctcgccgacgcctacctcggccgcttctggaccatcgcctccttcatgatcatctacatcttcggcctcggcctgctcaccatggccacctccgtgcacggcctcgtgcccgcctgcgcctccaagggcgtgtgcgaccccacgccgggccagtcggcggccgtcttcatcgcgctctacctcatcgcgctcggcaccggcgggatcaagccctgcgtctcctccttcggggccgaccagttcgacgagcacgacgacgtggagcgcaagagcaagagctccttcttcaactggttctacttctccatcaacatcggcgcgctggtggcctcgtccgtgctggtgtacgtgcagacgcatgtggggtggagctggggcttcggcatccccgccgtcgtcatggccatcgccgtcggcagcttcttcgtcggcacgccgctgtaccgccaccagcgccccggcggcagcccgctcacccgcatcgcgcaggtgctcgtggccgccacgcgcaagctcggcgtccccgtcgacgggtcggcgctgtacgagaccgcggacagggagtccggcatcgaggggagccgcaagctggagcacacggggcagttcaggttcctcgacaaggcggcggtggagacgcaggcggacaagacggcggccaccgggccgtcgccgtggcggctgtgcacggtgacgcaggtggaggagctcaagagcgtggtgcggctgctgcccatctgggcgagcggcatcgtcttcgccacggtgtacggccagatgagcaccatgttcgtgctacagggcaacaccctggacgcctccatgggtcccaagttcaagatcccctccgcctccctctccatcttcgacaccctcagcgtcatcgcctgggtgcccgtctacgaccgcatcctcgtcccggcagtgcgctccgtcaccggccggccccgcggcttcacccagctccagcgcatgggcatcggcctcgtggtctccatgttcgccatgctcaccgccggcgtgctcgagctcgtccgcctccgcaccatcgcgcagcgcggcctctacggggagaaggacgtggtgcccatctccatcttctggcaggtgccgcagtacttcatcatcggcgccgccgaggtgttcaccttcgtgggccagctcgagttcttctacgaccaggcgcccgacgccatgaggagcatgtgctccgcgctctcgctcaccaccgtcgcgctcgggaactacctcagcacgctgctcgtcaccgtcgtggccaagctcaccaccaggggaggcaagcaggggtggatccccgacaacctcaacgtcggccacctcgactacttcttctggctgctcgccgcgctcagcctcctcaacttcgccgtctacctcctcatcgccagctggtacacctacaagaagaccgccggagatgacccggacgccaaagccaaaggaggagctgatgatgcacatgaccagtgagtgactctggctgcaacagttcgtgtctgaatgcgtgcgtgttttctttttcaagagacatgacagaatagattgttgaaagaagaagaagaagaaagcaaggatcgagacttcagagttcagataggtgaaattaagggaggacaatgaaatgcgtggtgtgatttgtgacttcaagattcaagagtgttgccttgttgatt

SEQ ID NO: 531 - protein, 585 aa, Triticum aestivum
  misc_feature (98)..(500): Pfam Name: PTR2 Pfam Description: POT family
  misc_feature: Ceres Clone ID no. 816960
  misc_feature: Bit score of 1243.0 for HMM based on sequences of Figure 11
  misc_feature: Functional Homolog Of SEQ ID NO. 426
MGEVAAELYTQDGTIDIKGNPALKSNTGNWRACPYILANECCERLAYYGMSTNLVNFMKDRMGMANAAAANNVTNWGGTCYITPLIGAFLADAYLGRFWTIASFMIIYIFGLGLLTMATSVHGLVPACASKGVCDPTPGQSAAVFIALYLIALGTGGIKPCVSSFGADQFDEHDDVERKSKSSFFNWFYFSINIGALVASSVLVYVQTHVGWSWGFGIPAVVMAIAVGSFFVGTPLYRHQRPGGSPLTRIAQVLVAATRKLGVPVDGSALYETADRESGIEGSRKLEHTGQFRFLDKAAVETQADKTAATGPSPWRLCTVTQVEELKSVVRLLPIWASGIVFATVYGQMSTMFVLQGNTLDASMGPKFKIPSASLSIFDTLSVIAWVPVYDRILVPAVRSVTGRPRGFTQLQRMGIGLVVSMFAMLTAGVLELVRLRTIAQRGLYGEKDVVPISIFWQVPQYFIIGAAEVFTFVGQLEFFYDQAPDAMRSMCSALSLTTVALGNYLSTLLVTVVAKLTTRGGKQGWIPDNLNVGHLDYFFWLLAALSLLNFAVYLLIASWYTYKKTAGDDPDAKAKGGADDAHDQ

SEQ ID NO: 532 - protein, 570 aa, Arabidopsis thaliana
  misc_feature (96)..(499): Pfam Name: PTR2 Pfam Description: POT family
  misc_feature: Public GI ID no. 15232435
  misc_feature: Bit score of 1171.6 for HMM based on sequences of Figure 11
  misc_feature: Functional Homolog Of SEQ ID NO. 426
MEEKDVYTQDGTVDIHKNPANKEKTGNWKACRFILGNECCERLAYYGMGTNLVNYLESRLNQGNATAANNVTNWSGTCYITPLIGAFIADAYLGRYWTIATFVFIYVSGMTLLTLSASVPGLKPGNCNADTCHPNSSQTAVFFVALYMIALGTGGIKPCVSSFGADQFDENDENEKIKKSSFFNWFYFSINVGALIAATVLVWIQMNVGWGWGFGVPTVAMVIAVCFFFFGSRFYRLQRPGGSPLTRIFQVIVAAFRKISVKVPEDKSLLFETADDESNIKGSRKLVHTDNLKFFDKAAVESQSDSIKDGEVNPWRLCSVTQVEELKSIITLLPVWATGIVFATVYSQMSTMFVLQGNTMDQHMGKNFEIPSASLSLFDTVSVLFWTPVYDQFIIPLARKFTRNERGFTQLQRMGIGLVVSIFAMITAGVLEVVRLDYVKTHNAYDQKQIHMSIFWQIPQYLLIGCAEVFTFIGQLEFFYDQAPDAMRSLCSALSLTTVALGNYLSTVLVTVVMKITKKNGKPGWIPDNLNRGHLDYFFYLLATLSFLNFLVYLWISKRYKYKKAVGRAH

SEQ ID NO: 533 - DNA, 1758 bp, Sorghum bicolor
  misc_feature: Ceres Annot ID no. 8643789
  misc_feature: Encodes the peptide sequence at SEQ ID NO. 534
atggcggccatggccagtggaggagatgagacgacgacgacgacgcttgacgggacgacggatcactccggcaagccggcggtgcggagcaagacggggacgtggcgcgcgtgccctttcatcctgggcaacgagtgctgcgagcgcctggcctactacggcatgagctccaacctcgtcaactacatgatcgaccgcctccaccaggggaacgccgccgccgccaacaacgtcagcaactggtccggcacctgctacgtcatgcccctcctcggcgccttcctggccgacgcctacctcggcaggtaccgcaccatcgccgccttcatggcgctctacatcctcggcctcacgctgctcaccatgagcgccgccgtcccgggcctcaggccgccgcccgacggagcaggcgccgtgaccgcgggccagagcgccgccttcttcgtggcgctctacctcatcgcggtgggcacgggaggcatcaagccctgcgtctcatccttcggcgccgaccagttcgacgacgccgacccgcgcgagcgccagagcaagagctccttcttcaactggttctacatgtccatcaacgtcggcgcactcctcgcctcctccgtgctcgtctgggtccagatgaacgtcggctggggatggggctttggcatccccgccgccgccatggccgtcgccgtcgccagcttcctgatggggagcaagctgtacaggcaccagaagccggggggcagcccgctcacgcggatgctgcaggtggtggtcgccgcctggaggaagggaaagcagcccgtgcccgcggacgcgtccctgctccacgaggcgtcctccgcctccgcgtccgccatccagggcagcaggaagctggagcacacggagcagttccggtggctggacagggcggcggtggtgacctccaccgatgaggacggcaagaacaaccccgacccctggcggctgtgcacggtgacgcaggtggaggagctcaagagtgtcatccgtcttctgccggtgtgggcgagcggcatcgtcatgtcggcggtgtacagccagatgagcaccatgttcgtgctgcagggcaacacgctggacccgcgcatgggctccggcgccggcgccttcaagatcccctccgcctcgctctccatcttcgacaccctcagcgtcatcgcctgggcgcccgcctacgaccgactcgtcgtccccgccgcgcgccgctggacggggcacccgcgcggcttcacgcagctccagcgcatgggcatcggcctcgccgtctccgtcctgtccatgctcgccgcgggggcgctggaggtggccaggctccgcgtcgccgcctcgcacggcatgctcgacgactccaccaactacctgcccatctccatcttctggcaggtgccgcagtacttcatcatcggagccgcagaggtgttcaccttcatcggccagatcgagttcttctacgaccaggcgccggacgccatgaggagcatgggcaccgcgctctcgctcacctcgtccgcgctcggcagctacctcagcgcgctgctggtgtccgtcgtcaccgccatcaccacgaggaacggcggcctcggctggatccccgacaacctcaaccggggccacctcgactacttcttctggctgctctccgtgctcagcgtcatcaacttcgtcgtctacctctggattgcaaagtggtacaggtacaagcaggcaaccacaagttatgaactcagcagtgtatag

SEQ ID NO: 534 - protein, 585 aa, Sorghum bicolor
  misc_feature (103)..(510): Pfam Name: PTR2 Pfam Description: POT family
  misc_feature: Ceres Annot ID no. 8643789
  misc_feature: Bit score of 1111.7 for HMM based on sequences of Figure 11
  misc_feature: Functional Homolog Of SEQ ID NO. 426
MAAMASGGDETTTTTLDGTTDHSGKPAVRSKTGTWRACPFILGNECCERLAYYGMSSNLVNYMIDRLHQGNAAAANNVSNWSGTCYVMPLLGAFLADAYLGRYRTIAAFMALYILGLTLLTMSAAVPGLRPPPDGAGAVTAGQSAAFFVALYLIAVGTGGIKPCVSSFGADQFDDADPRERQSKSSFFNWFYMSINVGALLASSVLVWVQMNVGWGWGFGIPAAAMAVAVASFLMGSKLYRHQKPGGSPLTRMLQVVVAAWRKGKQPVPADASLLHEASSASASAIQGSRKLEHTEQFRWLDRAAVVTSTDEDGKNNPDPWRLCTVTQVEELKSVIRLLPVWASGIVMSAVYSQMSTMFVLQGNTLDPRMGSGAGAFKIPSASLSIFDTLSVIAWAPAYDRLVVPAARRWTGHPRGFTQLQRMGIGLAVSVLSMLAAGALEVARLRVAASHGMLDDSTNYLPISIFWQVPQYFIIGAAEVFTFIGQIEFFYDQAPDAMRSMGTALSLTSSALGSYLSALLVSVVTAITTRNGGLGWIPDNLNRGHLDYFFWLLSVLSVINFVVYLWIAKWYRYKQATTSYELSSV

SEQ ID NO: 535 - DNA, 1743 bp, Sorghum bicolor
  misc_feature: Ceres Annot ID no. 8631367
  misc_feature: Encodes the peptide sequence at SEQ ID NO. 536
atggatcctaccactattgattcgaaatggacgtctcccatcactgaagatgggtccatggacagacgaggaaacccagctgtcaagacaaccaccggaggatggagatctgccatcctgctgttagctaactatggactcgcgacgtgcgccttcttcggcgtcggcgtgaacctcgtggtgttcctgcgccgggtgctccaccagggcaacgccgaggcggccaacaacatcagcaagtggacagggaccgtctacatcttctccctcatcggcgccttcctcagcgactcctactggggccgttacgtcacctgcgccatctttcagatcatctatgtgacgggcctggtgatcctgtcgcttgcgtcatggttcttgttggtgaagccctccggctgcggcggcgtcaaggtgcactgcgacgagccgtcggcgcccggcgtcgcgctgttctacctgtccacctacatgatcgcgttcggcaacggagggtaccagccttccatcgcgaccttcggatcggaccagttcgacgagacggaccccaaggaggggcgctccaaggtcgccttcttcagctacttctacctggcgctcaacgtggggtccctgttttccaacacggtgctggtgtactacgaggactcagggcggtgggtcatggggttctgggtctcggcggccgccgccgcgctggcgctcgtgctcttcttgctcggcacgcccaactaccggcacttcaagccgagcggcaacccgctgacccgcgtcgcgcaggtgttcgtcgccgcgttccgcaagtggcacgctgaggttccccgcggcgagctcctccacgaggtggaaggagaggaccctaagatctcgggcatccgcaagatccttcacagcgacgagctcaggttcctcgacaaagcggcgacgatcaccgagggggagaagatggagaacccgtggaggctctgcacggtgacgcaggtggaggaggtgaagtgcatcctgaagatgctgcccatctggctgtgcacgatcgtgtactcggtggtgttcacccagatggcgtcgctgttcgtggagcagggcgccaccatggacaccaacatcgggtcgttccacttccccgcagcgagcatgtcgctgttcgacgtcctcagcgtgctggcgttcatcgccatctaccggcgggtcctggtgcccgtcatggcgcggctgtcgggcaacccgcagggcctgacggagctgcagcgcatgggcgtcgggctcgtgatcggcatggcggcgatggtggtggcgggcgtggtggaggtggagcggctgaagcgcgtggcagccccggaccagccgagctccctgagcgtgctgtggcaggtgccgcagtacgcgctgatcggggcgtcggaggtgttcatgtacgtggggcagctggagttcttcaacgggcaggcgcccgacggcgtcaagagcttcggcagcgcgctgtgcatggcgtccatctcgctggggaactacgtgagcatcatgctggtgagcgtggtcacaagcctcaccgccggggagaagcgtccggggtggatccctgggaacctcaactccggccacctggacaggttctacttcctcctcgcagcgctctcgctcgtcgacctcgccgtctacatcgcctgtgccatgtggtacaagggcatcaagcttgacggcggcgacggcgatgacagtagaaaggtctctgcgcatgtctag

SEQ ID NO: 536 - protein, 580 aa, Sorghum bicolor
  misc_feature (103)..(499): Pfam Name: PTR2 Pfam Description: POT family
  misc_feature: Ceres Annot ID no. 8631367
  misc_feature: Bit score of 1335.6 for HMM based on sequences of Figure 11
  misc_feature: Functional Homolog Of SEQ ID NO. 426
MDPTTIDSKWTSPITEDGSMDRRGNPAVKTTTGGWRSAILLLANYGLATCAFFGVGVNLVVFLRRVLHQGNAEAANNISKWTGTVYIFSLIGAFLSDSYWGRYVTCAIFQIIYVTGLVILSLASWFLLVKPSGCGGVKVHCDEPSAPGVALFYLSTYMIAFGNGGYQPSIATFGSDQFDETDPKEGRSKVAFFSYFYLALNVGSLFSNTVLVYYEDSGRWVMGFWVSAAAAALALVLFLLGTPNYRHFKPSGNPLTRVAQVFVAAFRKWHAEVPRGELLHEVEGEDPKISGIRKILHSDELRFLDKAATITEGEKMENPWRLCTVTQVEEVKCILKMLPIWLCTIVYSVVFTQMASLFVEQGATMDTNIGSFHFPAASMSLFDVLSVLAFIAIYRRVLVPVMARLSGNPQGLTELQRMGVGLVIGMAAMVVAGVVEVERLKRVAAPDQPSSLSVLWQVPQYALIGASEVFMYVGQLEFFNGQAPDGVKSFGSALCMASISLGNYVSIMLVSVVTSLTAGEKRPGWIPGNLNSGHLDRFYFLLAALSLVDLAVYIACAMWYKGIKLDGGDGDDSRKVSAHV

SEQ ID NO: 537 - protein, 612 aa, Vitis vinifera
  misc_feature (141)..(545): Pfam Name: PTR2 Pfam Description: POT family
  misc_feature: Public GI ID no. 157339093
  misc_feature: Bit score of 1272.6 for HMM based on sequences of Figure 11
  misc_feature: Functional Homolog Of SEQ ID NO. 426
MLLFSVRIYVHFLSVREKNHEDLFSKQLGSLHYVSCVGWFILYLQNENSDLHTGDGSVDIHGKPVLRSNTGNWRACPFILGTECCERLAYYGIATNLVTYLTSKLHEGNVSAARNVTTWQGTCYLTPLIGAVLADAYCGRYWTIAAFSTIYFIGMCTLTLSATVPAFKPADCVGSVCPPATTAQYAVFFFGLYLIALGTGGIKPCVSSFGADQFDDTDPKERVKKGSFFNWFYFSINIGALVSSSFLVWIQDNAGWGLGFGIPALFMGIAIASFFSGTPLYRFQKPGGSPITRMCQVLVASFRKWKLEVPKDSNLLYETPDKNSAIEGSRKLEHSNELKCLDKAAVISDAEIKSGDFSNPWNLCTVTQVEELKILIRMFPIWATGIVFSAVYAQMSTMFVEQGMVMDTNIGSFTIPPASLSTFDVISVIFWVPVYDRILVPIARKFTGKERGFSELQRMGIGLFLSVLCMSAAALVEIKRLQLATALDLVDEDVAVPLSILWQIPQYFLLGAAEVFTFIGQLEFFYDQSPDAMRSLCSALSLLTTSLGNYLSAFILTVVTTLTTEDGKTGWIPDNLNKGHLDYYFWLLAGLSFLNLLVYMICAKIYKRKKGS

SEQ ID NO: 538 - DNA, 1767 bp, Sorghum bicolor
  misc_feature: Ceres Annot ID no. 8633031
  misc_feature: Encodes the peptide sequence at SEQ ID NO. 539
atggccggcgccgagcgcgtggaggctccctccttggaggagcaagggctcctcgctctagaggaatccaaccaactagtatacactggagatggatcagttgacttttctggaaatcctgttatcaaggaaagaactggtagatggaaggcatgtccattcatattaggtaatgaatgctgtgaacgactggcctattatggcatcgccacgaaccttgttacttacttgacaaaaaagctacatgttggcaatgcctctgctgctagcaacgtgactacatggcagggaacttgctacttgactccgcttattggagcagtcctggctgatgcatactgggggaagtattggataattgcaacatcctccatagtgtacttcatcgggatggtaatactgactctttcagcatcagttcctatgctcatgcctccatcctgtgaaggatccttttgcgcaccagcaagcccttttcagtatactgtcttttttcttggtctttatctgattgcactgggtgctggtggaattaagccatgcgtctcgtcctttggagctgatcaatttgatgatacagatcctgatgagcgaatccagaagggttctttctttaattggttctatctttcaataaatattggtggcctcatatcaagcagctttctggtttgggtgcaagacaatgttggatggggactgggctttggcattccgacagtatccatggggctggcaatcataagcttcttctctggcacatcactttataggttccaaaaacctggaggtagtcctattacacgagtatgccaggtgattgttgcctcgttgcgcaagtggaatgtgcatgtcccagaggacagctctctcttgtatgagcaacctgatggggtatcaacaattgaggggagtcggcaattagagcacacagatgaactcagattttttgacaaggctgctacagttgccaaagttgacgtgaaaactgctgacttcaacaatccatggcggatatgcacagtcacgcaggtggaagaactaaagatactggtaaggatgttccctatatgggcaacaacaatcgtgttttctgttgcatatgctcagatgtcaacaatgtttgtggaacaaggcatggtgcttgacccatccttgggttcattcaagtttcctccagcgtcgttatctacttttgacaccctaaccatcatcatatgtgtcccgatgtacaattacatcatggttccaatagctaggagattcactggcaacgggaggggctttacagagttgcagaggatgggcattggcctggtaatttccatcatagctatgtcagtcgctgcaatccttgaaatcaagcggctagaagttgccagggaagcacacctggtagatcagaacatcccagtcccattgagcatattctggcaaatccctcagtatttcctgatcggtctagcggaggtgttcacattcatcggagcgctcgagttcttttataatcagtcaccggatgccatgaggagcgtctgcagcgcacttaatcttctcaccgtttcctttgggaactatctcaacacgttcattttgacaatggttgcatactttactacaaggggaggtaaccctggatggattcctgacaacttgaacgaagggcatcttgattacttcttctggctcattgctggcctcagttttctgaacctgattgtatatgtcatctgtgctagcaaatacaagagcaagaaggcagcttga

SEQ ID NO: 539 - protein, 588 aa, Sorghum bicolor
  misc_feature (117)..(521): Pfam Name: PTR2 Pfam Description: POT family
  misc_feature: Ceres Annot ID no. 8633031
  misc_feature: Bit score of 1182.5 for HMM based on sequences of Figure 11
  misc_feature: Functional Homolog Of SEQ ID NO. 426
MAGAERVEAPSLEEQGLLALEESNQLVYTGDGSVDFSGNPVIKERTGRWKACPFILGNECCERLAYYGIATNLVTYLTKKLHVGNASAASNVTTWQGTCYLTPLIGAVLADAYWGKYWIIATSSIVYFIGMVILTLSASVPMLMPPSCEGSFCAPASPFQYTVFFLGLYLIALGAGGIKPCVSSFGADQFDDTDPDERIQKGSFFNWFYLSINIGGLISSSFLVWVQDNVGWGLGFGIPTVSMGLAIISFFSGTSLYRFQKPGGSPITRVCQVIVASLRKWNVHVPEDSSLLYEQPDGVSTIEGSRQLEHTDELRFFDKAATVAKVDVKTADFNNPWRICTVTQVEELKILVRMFPIWATTIVFSVAYAQMSTMFVEQGMVLDPSLGSFKFPPASLSTFDTLTIIICVPMYNYIMVPIARRFTGNGRGFTELQRMGIGLVISIIAMSVAAILEIKRLEVAREAHLVDQNIPVPLSIFWQIPQYFLIGLAEVFTFIGALEFFYNQSPDAMRSVCSALNLLTVSFGNYLNTFILTMVAYFTTRGGNPGWIPDNLNEGHLDYFFWLIAGLSFLNLIVYVICASKYKSKKAA

SEQ ID NO: 540 - protein, 591 aa, Oryza sativa subsp. indica
  misc_feature (121)..(525): Pfam Name: PTR2 Pfam Description: POT family
  misc_feature: Public GI ID no. 125543029
  misc_feature: Bit score of 1142.8 for HMM based on sequences of Figure 11
  misc_feature: Functional Homolog Of SEQ ID NO. 426
MEEAAEDRRLQVREEGGDQEPLLLLPQDANLYTGDGSVDIKGRPALKHATGNWRACFFILGDECCERLAYYGIAKNLVTYLKTNLHQGNLEAARNVTTWQGTCYLTPLIGALLADSYWGKYWTIAAFSAIYFIGLVALTLSASVPALQPPKCSGSICPEASLLQYGVFFSGLYMIALGTGGIKPCVSSFGADQFDDSDPADRVKKGSFFNWFYFCINIGAFVSGTVIVWIQDNSGWGIGFAIPTIFMALAIASFFVASNMYRFQKPGGSPLTRVCQVVVAAFRKWHTEVPHDTSLLYEVDGQTSAIEGSRKLEHTSELEFFDKAAIISSDDAKSDSFTNPWRLCTVTQVEELKILIRMFPIWATTIIFNAVYAQNSSMFIEQGMVLDKRVGSFIVPPASLSTFDVISVIIWIPFYDRVLVPIARKFTGREKGFSELQRIGIGLALSILAMLSAALVELRRLEIARSEGLIHEDVAVPMSILWQIPQYFLVGAAEVFAAIGQVEFFYNEAPDAMRSLCSAFALVTVSLGSYLSSIILTLVSYFTTQGGDPGWIPDNLNEGHLDRFFSLIAGINFVNLLVFTGCAMRYRYKKA

SEQ ID NO: 541 - protein, 593 aa, Oryza sativa subsp. japonica
  misc_feature (122)..(526): Pfam Name: PTR2 Pfam Description: POT family
  misc_feature: Public GI ID no. 115454995
  misc_feature: Bit score of 1234.1 for HMM based on sequences of Figure 11
  misc_feature: Functional Homolog Of SEQ ID NO. 426
MAEVTVVRAEREEESTLEQGLLAIPEESNQLTYTGDGSVDFSGNPVVKERTGRWRACPFILGNECCERLAYYGISTNLVTYLTKKLHDGNASAASNVTAWQGTCYLTPLIGAILADAYWGRYWTIATFSTIYFIGMAVLTLSASVPTFMPPPCEGSFCPPANPLQYTVFFLGLYLIALGTGGIKPCVSSFGADQFDDTDPVERIQKGSFFNWFYFSINIGALISSSFLVWVQDNIGWGIGFGIPTIFMGLAIISFFSGTSLYRFQKPGGSPITRVCQVVVASFRKWNVHVPEDSSRLYELPDGASAIEGSRQLEHTDELRCLDKAATITDLDVKADSFTNPWRICTVTQVEELKILVRMFPVWATTIVFSAVYAQMSTMFVEQGMMLDTSVGPFKIPPASLSTFDVVSVIIWVPLYDSILVPIARRFTGNPRGFTELQRMGIGLVISIFSMAAAAVLEIKRLDIARAEHLVDQNVPVPLNICWQIPQYFLVGASEVFTFVGSLEFFYDQSPDAMRSLCSALQLVTTALGNYLSAFILTLVAYFTTRGGNPGWIPDNLNQGHLDYFFWLLAGLSFLNFVIYVICANKYKSKKAA

SEQ ID NO: 542 - DNA, 1758 bp, Medicago truncatula
  misc_feature: Ceres Annot ID no. 8755090
  misc_feature: Encodes the peptide sequence at SEQ ID NO. 543
atggaaccagcaggaccccccaacaatgtcaatcctgacaatattgaagtagttgaggcgacagaaggaaatcatgtcaatggagaagtggcagatggaaagagtaaaggaggatggacaactgcatacatcttgctagctaatcaagcactggcaacactagcattctttggagttggagtgaacttggttctgttcctaacgagagtccttcgtcaagacagtgccgaggctgctaataatgtcagcttgtggactggaactgtttacatattttcactcttgggagcattccttagtgattcttattggggaagatacttaacatgcgctatctttcagctcttctttgttctgggtttggggctgatgtctttgacatcatggctgtttttgatcaaaccattaggttgcggtaatgaacatagcgtttgcaatgaaccaacaccattgggaataggcctattctatttgtcaatatatttggttgcatttggatatggagggcatcaacctaccttagcaacatttggagctgatcaatttgatgataagagtattcaacaaaccaactccagagaggctttctttagttacttttactttgcactcaatgttggatcactattttccaacaccattttggtttattacgaagataccggtatgtggacattgggtttcggtgtctccttagcctctgctattatagccttgatttcattcttagcaggatctcgaaaatatcgatatgttaaggcgtatggcaatcctgtcataagagtaatccaggtctttgttgctgccactaggaagtggaatgttgaacccgccaaggaggaccaactttacgaggttgacggcaatgtatccgccatcaaaggaagcagaaagattcttcactcccaagatataagattcatggacaaggcggcaacacggacagtaaaagacgggaatgaatccgggaaccaatggcgactttgcactgtaactcaagttgaggaagccaaatgtgtgttgagaatgataccagtttggctgtgcactattatttactctgttgtattcacacaaatggcttctctttttgtcgaacaaggtgatgtaatgaacaacaaggtaggaaaatttcacttgccagcagcaaccatgtctgtgtttgatatatgcagtgtccttgtatgcactggactttatcgccaagttctagttcccttggccggaaaattaagcggtaatcctaaggggttaagcgaacttcaaagaatgggagttggcctagttattggaatgcttgcgatggttgcagctggtgtaacggagtttgaaaggcttaaacaagttcagcctggacagaaacaaagtaatttgagtatattctgtcaaattccacagtatgttcttgttggtgcttcagaagtttttatgtatgtgggtcagttggagttcttcaatggtcaagcacctgatggcataaaaagctttggaagttcactttgtatggcatcaatttctcttggaaactatgttagcagcatgatggtgaaattggtgatgatattcactgctagaggcgaggaacctggatggattccgaataacttaaatgttgggcacatggacaggtttttctacctcattgcagcgctaagtgcccttgaccttgtcatctatgtgttctgtgctcggtggtacaagggtgtcacgaacattgaaggtagtgacaatgtcggaagccaagaggacaatgtttga

SEQ ID NO: 543 - protein, 585 aa, Medicago truncatula
  misc_feature (107)..(505): Pfam Name: PTR2 Pfam Description: POT family
  misc_feature: Ceres Annot ID no. 8755090
  misc_feature: Bit score of 1170.2 for HMM based on sequences of Figure 11
  misc_feature: Functional Homolog Of SEQ ID NO. 426
MEPAGPPNNVNPDNIEVVEATEGNHVNGEVADGKSKGGWTTAYILLANQALATLAFFGVGVNLVLFLTRVLRQDSAEAANNVSLWTGTVYIFSLLGAFLSDSYWGRYLTCAIFQLFFVLGLGLMSLTSWLFLIKPLGCGNEHSVCNEPTPLGIGLFYLSIYLVAFGYGGHQPTLATFGADQFDDKSIQQTNSREAFFSYFYFALNVGSLFSNTILVYYEDTGMWTLGFGVSLASAIIALISFLAGSRKYRYVKAYGNPVIRVIQVFVAATRKWNVEPAKEDQLYEVDGNVSAIKGSRKILHSQDIRFMDKAATRTVKDGNESGNQWRLCTVTQVEEAKCVLRMIPVWLCTIIYSVVFTQMASLFVEQGDVMNNKVGKFHLPAATMSVFDICSVLVCTGLYRQVLVPLAGKLSGNPKGLSELQRMGVGLVIGMLAMVAAGVTEFERLKQVQPGQKQSNLSIFCQIPQYVLVGASEVFMYVGQLEFFNGQAPDGIKSFGSSLCMASISLGNYVSSMMVKLVMIFTARGEEPGWIPNNLNVGHMDRFFYLIAALSALDLVIYVFCARWYKGVTNIEGSDNVGSQEDNV

SEQ ID NO: 544 - DNA, 1794 bp, Glycine max
  misc_feature: Ceres Annot ID no. 8755097
  misc_feature: Encodes the peptide sequence at SEQ ID NO. 545
atggcctgcttagaagtcagcaaagaggtaaagttcaaaggtgacacggaagaactcactcttgatggaagtgttgattggcatggtcgccctgcaattagagccaaatctggcagatgggttgctggaaccatcgttctattgaaccaaggtctggcaaccttagcattctttggagtaggggtgaacctagtgctgttcctgacaagagtgatggggcaagataatgctgaagctgcaaacaatgtgagcaagtggactggcacagtttacatcttctctcttgtgggtgctttcctaagtgattcgtattggggaagatacaaaacttgtgccatctttcaggtcatctttgtaataggtctagtatccttgtctctttcatcatacctctccttgattaggcctaaaggttgtgggaatgaaacaattccatgtgggaaacattcaagcttggagatggggatgttctacctctcaatctatcttattgctttagggaatggagggtatcaaccaaatattgccacatttggagctgatcagtttgacgaggagcactcaaaggagggttactcaaaggttgccttctttagctacttctatctggctttgaaccttggttcactcttctcaaacacaattctaggctattttgaagatgaaggactgtgggctctagggttctgggtgtctgcaggctctgcttttgctgcccttgtcttatttcttcttgggaccccaagatatagacacttcaaacctagtggcaatcctctttcaaggttcagccaagtccttgttgctgcatcaaggaaatggagagctcaaatggcatcaaatggagaggatctatatgtcatggatgaaaatgaatctcccaccaatggcaacaggaagattctccacaccgaagggttcaagtttctggatagagcagcgattatatcttccagagatctagaagaccaaaagagtggcgtttataacccctggcgtctctgccctataactcaagttgaagaagtgaagtgcatactaagacttcttcctatttggctttgcacgataatatactcagtggttttcacacaaatggcttctctttttgtggagcaaggggctgccatgaaaactacaatttcccatttcagaataccacctgcaagcatgtctagctttgacatcctcagcgtagctgtcttcattttcttctaccgtcgagtgattgatccacttgtcggaagacttaaaaagaaaagttccaagggacttactgagcttcagagaatgggaatagggcttgttatagctgtaatggcaatggtttcagctggaatagttgaatgctacagacttaagtatgcagacccagtatgcccccactgcagtggcacaagctctttaaccatcttttggcaaattcctcagtacacacttattggagcttcagaggttttcatgtatgtaggccagttagagttcttcaatgctcagacgccagatggcttaaagagcttcggaagtgccctttgcatgacgtccatatctcttgggaactacgtaagtagcttacttgttagtatagttatgaagatctccactgaggatcacatgccagggtggatccctggaaacttaaacagaggtcacctagataggttttacttcctcttagctatcttgacatctatagatttggtcctttatattgcatgtgcaaagtggttcaagagtatacagctggaagggaaatatgaagagaatgatatgcctggtagctttaaagtctaa

SEQ ID NO: 545 - protein, 597 aa, Glycine max
  misc_feature (108)..(516): Pfam Name: PTR2 Pfam Description: POT family
  misc_feature: Ceres Annot ID no. 8755097
  misc_feature: Bit score of 1281.3 for HMM based on sequences of Figure 11
  misc_feature: Functional Homolog Of SEQ ID NO. 426
MACLEVSKEVKFKGDTEELTLDGSVDWHGRPAIRAKSGRWVAGTIVLLNQGLATLAFFGVGVNLVLFLTRVMGQDNAEAANNVSKWTGTVYIFSLVGAFLSDSYWGRYKTCAIFQVIFVIGLVSLSLSSYLSLIRPKGCGNETIPCGKHSSLEMGMFYLSIYLIALGNGGYQPNIATFGADQFDEEHSKEGYSKVAFFSYFYLALNLGSLFSNTILGYFEDEGLWALGFWVSAGSAFAALVLFLLGTPRYRHFKPSGNPLSRFSQVLVAASRKWRAQMASNGEDLYVMDENESPTNGNRKILHTEGFKFLDRAAIISSRDLEDQKSGVYNPWRLCPITQVEEVKCILRLLPIWLCTIIYSVVFTQMASLFVEQGAAMKTTISHFRIPPASMSSFDILSVAVFIFFYRRVIDPLVGRLKKKSSKGLTELQRMGIGLVIAVMAMVSAGIVECYRLKYADPVCPHCSGTSSLTIFWQIPQYTLIGASEVFMYVGQLEFFNAQTPDGLKSFGSALCMTSISLGNYVSSLLVSIVMKISTEDHMPGWIPGNLNRGHLDRFYFLLAILTSIDLVLYIACAKWFKSIQLEGKYEENDMPGSFKV

SEQ ID NO: 546 - DNA, 1797 bp, Glycine max
  misc_feature: Ceres Annot ID no. 8755098
  misc_feature: Encodes the peptide sequence at SEQ ID NO. 547
atgtcttgcttagagtctcatgtctacaaagaggtaattagaaagtttgaagaagagtcagaagaagtcactcttgatgggagtgttgatttccatggacgtcctgcaatcagagccaaatctggcagatgggtggctgcaattatcatactcttgaaccaagctctggcaacccttgcattctttgggatcggcgtgaacctagtgttgtttctgacaagggtggtaggacaaaacaatgctgatgcagccaacaatgtgagcaagtggaccggaactgtttacatcttctctcttgtgggtgctttcctcagtgattcttattggggaagatataaaacatgtgctgtctttcaggtcatctttgttataggtctaatgtccttatccctgtcatcatacctattcttgcttaagcctaaaggttgtgggaatgaaacagttagttgtgggaaacattcaaaattggagatggggatgttctacctctcaatctatcttgttgccttggggaatggaggttatcaaccaaatattgccacatttggggctgatcagtttgatgaggagcactcaaaggagggtcacaacaaggtggccttctttagctacttctacctagcttttaacattggccaactcttctcaaacaccattcttgtctattttgaggacgaaggaatgtgggctcttggtttctggctgtctgcaggatctgcctttgctgcattggtcttgtttcttatatgcaccccaaggtatagacacttcaagcccagtggcaaccctatctccaggttcagccaagtcctagtggctgcatcaaggaaatccaaacttcaaatgtcatcaaacggagaggacttattcaacatggatgcaaaggaggcatccaacgatgccaacagaaagattctccacactcacgggttcaagttcttggatagggcagcgttcatatcttcaagagatctaggggaccagaaagggctcggttacaacccatggcgtctctgtcctgtaagtcaagttgaagaagtgaagtgcatactgagacttcttccaatctggctctgcaccataatatactcagtagttttcacacaaatggcttcactttttgtggagcaaggtgctgccatgaaaaccaaggtttccaacttcagaataccaccagctagcatgtccagctttgatatcctcagtgtggctgttttcattttcttttaccgtcgagttcttgatccatttgtgggaaaacttaaaaagacagattctaagggacttacagagcttcagagaatgggagttggacttgttatagctgtactggcaatggtttcggctggattagttgaatgctataggctcaagtatgcaaaacaaggatgcctacactgcaatgactcgagcactttaagcatcttctggcaaatccctcagtatgcatttataggagcttctgaggtttttatgtacgtaggtcagttggagttcttcaacgctcagacaccagacggcttaaagagctttggaagtgctctttgcatgacatccatttcccttgggaactatgtgagtagtttacttgttagtgtggttatgaagatatccaccgaagatcacatgccggggtggatccctggacacctcaacaaaggccacttagataggttttacttcctcttagctgccttgacatcgatagacttgatcgcttatattgcatgtgcaaaatggtacaagtctatacagctagaggccaaaactggagagattgatgagacacaagtataa

SEQ ID NO: 547 - protein, 598 aa, Glycine max
  misc_feature (112)..(520): Pfam Name: PTR2 Pfam Description: POT family
  misc_feature: Ceres Annot ID no. 8755098
  misc_feature: Bit score of 1255.3 for HMM based on sequences of Figure 11
  misc_feature: Functional Homolog Of SEQ ID NO. 426
MSCLESHVYKEVIRKFEEESEEVTLDGSVDFHGRPAIRAKSGRWVAAIIILLNQALATLAFFGIGVNLVLFLTRVVGQNNADAANNVSKWTGTVYIFSLVGAFLSDSYWGRYKTCAVFQVIFVIGLMSLSLSSYLFLLKPKGCGNETVSCGKHSKLEMGMFYLSIYLVALGNGGYQPNIATFGADQFDEEHSKEGHNKVAFFSYFYLAFNIGQLFSNTILVYFEDEGMWALGFWLSAGSAFAALVLFLICTPRYRHFKPSGNPISRFSQVLVAASRKSKLQMSSNGEDLFNMDAKEASNDANRKILHTHGFKFLDRAAFISSRDLGDQKGLGYNPWRLCPVSQVEEVKCILRLLPIWLCTIIYSVVFTQMASLFVEQGAAMKTKVSNFRIPPASMSSFDILSVAVFIFFYRRVLDPFVGKLKKTDSKGLTELQRMGVGLVIAVLAMVSAGLVECYRLKYAKQGCLHCNDSSTLSIFWQIPQYAFIGASEVFMYVGQLEFFNAQTPDGLKSFGSALCMTSISLGNYVSSLLVSVVMKISTEDHMPGWIPGHLNKGHLDRFYFLLAALTSIDLIAYIACAKWYKSIQLEAKTGEIDETQV

SEQ ID NO: 548 - DNA, 1761 bp, Glycine max
  misc_feature: Ceres Annot ID no. 8755099
  misc_feature: Encodes the peptide sequence at SEQ ID NO. 549
atggaagaaaaggtaaataaggagcaccaggtttgcacatcggatggagctattgatagccagggtcatcctgcagttcgagagaaaacgggtgactgggttgctgcaattttgattttagtgaatcaagggcttgctactttggcattctttggaattggagtgaatttggtgttgtttttgacgagagtgatgggtcaagacaatgctgaagcagccaacagtgtgagcaagtggacagggacagtttacctcttctctcttcttggagccttccttagtgactcttactggggaaggtacatgacctgtgccatcttccaggtcatatttgttattggtttggtgtcattatcactatcgtcttacatattcctactgaagccaagtggttgtggaaataaagagttaccatgtggatcacactcatcataccaaacgattttattctatgtttccatatacctaatagctctaggaaatggaggataccagcctaacattgctacatttggggctgatcaatttgatgaaggagataccagggaacaacattcaaaaattgtatttttcagctatttttatttggctttgaacattgggtcactcttctccaacaccatattgaattattttgaggatgatggactatggactttggggttctgggcttcagctggctctgctgctctggcattggttttgtttctttgtggcacacgaaggtatagatactttaagcctaatggaaaccctcttcctagattttgccaagtttttgtggctgctacaagaaaatggaaggtcaaggtgttacaagatgataaactttacgaggttgatgaattctcaaccgatgaagggagaaaaatgctccatactgaaggatttagattcttagacaaagcagcatttatcacatcaaagaatttcaaacaaatggaagagagtaaatgcagtccatggtatctatccactgtgacacaagtagaagaagtgaaatgcattctaagactactcccaatttggctatgcaccatattatactctgtcgtttttgctcaaatggcatcactttttgtggagcaaggcgatgccatggacactagaatatcatctttccacattcctccagcaagcatgtccacctttgacattctaagtgtagcaattgtcatcttcatttataggcgagttctcgaccctcttgtggccagaacaatgaaatcaaaaggactcactgaacttcaaaggatgggaattggtctagtcctagcaattatggccatggtttcagcaggattggtggagcactttaggctaaagaatgcaatagaagactgcaatgaatgtaaagggtctagttcactttccatattttggcaagtgccacaatatgtgtttgtgggggcatcagaagttttcatgtatgtgggtcaattagagttcttcaatgcacaaacacctgatggattaaagagttttggtagtgcactttgcatgacttcaatatcacttggaaactacgttagtagcttgcttgttgcaattgtgatgaagatttctgccacagatgagatgccaggatggatcccaggaaacttgaacaaagggcatttggatatgttttacttcctcttagcagcactcaccgcagctgatcttgtaatatatgtactgatggctaggtggtataaatatgtcaaatttcaaggaaacaatgagaatgacaccaacaaagaagaccctgaagtagtgtag

SEQ ID NO: 549 - protein, 586 aa, Glycine max
  misc_feature (101)..(504): Pfam Name: PTR2 Pfam Description: POT family
  misc_feature: Ceres Annot ID no. 8755099
  misc_feature: Bit score of 1291.8 for HMM based on sequences of Figure 11
  misc_feature: Functional Homolog Of SEQ ID NO. 426
MEEKVNKEHQVCTSDGAIDSQGHPAVREKTGDWVAAILILVNQGLATLAFFGIGVNLVLFLTRVMGQDNAEAANSVSKWTGTVYLFSLLGAFLSDSYWGRYMTCAIFQVIFVIGLVSLSLSSYIFLLKPSGCGNKELPCGSHSSYQTILFYVSIYLIALGNGGYQPNIATFGADQFDEGDTREQHSKIVFFSYFYLALNIGSLFSNTILNYFEDDGLWTLGFWASAGSAALALVLFLCGTRRYRYFKPNGNPLPRFCQVFVAATRKWKVKVLQDDKLYEVDEFSTDEGRKMLHTEGFRFLDKAAFITSKNFKQMEESKCSPWYLSTVTQVEEVKCILRLLPIWLCTILYSVVFAQMASLFVEQGDAMDTRISSFHIPPASMSTFDILSVAIVIFIYRRVLDPLVARTMKSKGLTELQRMGIGLVLAIMAMVSAGLVEHFRLKNAIEDCNECKGSSSLSIFWQVPQYVFVGASEVFMYVGQLEFFNAQTPDGLKSFGSALCMTSISLGNYVSSLLVAIVMKISATDEMPGWIPGNLNKGHLDMFYFLLAALTAADLVIYVLMARWYKYVKFQGNNENDTNKEDPEVV

SEQ ID NO: 550 - protein, 584 aa, Artificial sequence
  misc_feature (1)..(584): Artificial sequence of unknown origin
  misc_feature (100)..(504): Pfam Name: PTR2 Pfam Description: POT family
  misc_feature: Bit score of 1304.3 for HMM based on sequences of Figure 11
  misc_feature: Functional Homolog Of SEQ ID NO. 426
MDQKVRQFEVCTQDGSVDRHGNPAIRANTGKWLTAILILVNQGLATLAFFGVGVNLVLFLTRVMGQDNAEAANNVSKWTGTVYIFSLLGAFLSDSYWGRYKTCAIFQASFVAGLVMLSLSTGALLLEPSGCGVEESPCKPHSTVKTVIFYLSVYLIALGYGGYQPNIATFGADQFDADDSVEGHSKIAFFSYFYLALNLGSLLSNTVLGYFEDQGAWPLGFWASAGSAFAGLVLFLTGTPKYRHFKPRESPWSRFCQVLVASTRKAKIDVNYEDMNLYDSETQRTGDKKILHTKGFRFLDRAAIVTPDDEAEKVESGSTYDPWRLCSVTQVEEVKCVLRLLPIWLCTILYSVVFTQMASLFVVQGAAMKTNIKDFRIPASSMSTFDILSVAFFIFAYRRFLDPLFARLNKREPNKGLTELQRMGIGLVIAITAMISAGIVEIYRLKHKETASNSSSLSIFWQVPQYMMIGASEVFMYVGQLEFFNSQAPTGLKSFASALCMASISLGNYVSSLLVSIVMKISTRDYLPGWIPGNLNKGHLDRFYFLLAGLTAADFLVYLVCAKWYKYIKSEASFSESMDEEEEV

SEQ ID NO: 551 - protein, 596 aa, Glycine max
  misc_feature (110)..(518): Pfam Name: PTR2 Pfam Description: POT family
  misc_feature: Bit score of 1258.7 for HMM based on sequences of Figure 11
  misc_feature: Functional Homolog Of SEQ ID NO. 426
MSYLESQVYKERKFEEESEEVTLDGSVDFHGRPAIRAKSGRWVAAIIILLNQALATLAFFGIGVNLVLFLTRVVGQNNADAANNVSKWTGTVYIFSLVGAFLSDSYWGRYKTCAVFQVIFVIGLMSLSLSSYLFLLKPKGCGNESVNCGKHSKLEMGMFYLSIYLVALGNGGYQPNIATFGADQFDEEHSKEGHNKVAFFSYFYLAFNIGQLFSNTILVYFEDEGMWALGFWLSAGSAFAALVLFLVCTPRYRHFKPSGNPLSRFSQVLVAASRKSKVQMSSNGEDLFNMDAKEASNNANRKILHTHGFKFLDRAAFISSRDLGDQKGLGYNPWHLCPVSQVEEVKCILRLLPIWLCTIIYSVVFTQMASLFVEQGAAMKTKVSNFRIPPASMSSFDILSVAVFIFFYRRVLDPFVGKLKKTDSKGLTELQRMGVGLVIAVLAMVSAGLVECYRLKYAKQGCIHCNDSSTLSIFWQIPQYAFIGASEVFMYVGQLEFFNAQTPDGLKSFGSALCMTSISLGNYVSSLLVSVVMKISTEDHMPGWIPGNLNKGHLDRFYFLLAALTSIDLIAYIACAKWYKSIQLEANTGEIDEPEV

SEQ ID NO: 552 - protein, 526 aa, Arabidopsis thaliana
  misc_feature (37)..(446): Pfam Name: PTR2 Pfam Description: POT family
  misc_feature: Bit score of 1087.2 for HMM based on sequences of Figure 11
  misc_feature: Functional Homolog Of SEQ ID NO. 426
MGQDNAEAANNVSKWTGTVYIFSLLGAFLSDSYWGRYKTCAIFQASFVAGLMMLSLSTGALLLEPSGCGVEDSPCKPHSTFKTVLFYLSVYLIALGYGGYQPNIATFGADQFDAEDSVEGHSKIAFFSYFYLALNLGSLFSNTVLGYFEDQGEWPLGFWASAGSAFAGLVLFLIGTPKYRHFTPRESPWSRFCQVLVAATRKAKIDVHHEELNLYDSETQYTGDKKILHTKGFRFLDRAAIVTPDDEAEKVESGSKYDPWRLCSVTQVEEVKCVLRLLPIWLCTILYSVVFTQMASLFVVQGAAMKTNIKNFRIPASSMSSFDILSVAFFIFAYRRFLDPLFARLNKTERNKGLTELQRMGIGLVIAIMAMISAGIVEIHRLKNKEPESATSISSSSTLSIFWQVPQYMLIGASEVFMYVGQLEFFNSQAPTGLKSFASALCMASISLGNYVSSLLVSIVMKISTTDDVHGWIPENLNKGHLERFYFLLAGLTAADFVVYLICAKWYKYIKSEASFSESVTEEEEV

SEQ ID NO: 553 - DNA, 857 bp, Zea mays
  misc_feature: Ceres Clone ID no. 1384304
  misc_feature: Encodes the peptide sequence at SEQ ID NO. 554
ttactgcttcaattcgatcgttgctagaaagttgaaaccacgacatcggaggcgtgaaaaagttttaagtcacaccgaatcaatcaagtgggagggacacgttcttcaacctattaatcaaaccccactcttctcggtcacgaaagtcttggaagctttgcctgatttcgagcgacgatggacagatcggcgtcggtgggtatcaaggacggcggatttggtggcaaccacttgtattctccatcattttcttcttcatcttccatgagacatgtcaattacagttgtggatcttgtgggtacgagctgaacttgagctccaccaatcgaattacatcatcaattggatcgaagtatgggaaatccatgaagactggaatcatatccttcttcaacattgacgaggggagattcagccaggttgatgagttccaatgcatgcctcacttctccagatactcttggggtttgttcagacgcaagactaagcttctctgtcgccaatgtaataactacataggcaatgcttcttatgacaaggcccctcctgagtacgcactcgtaacacaaaactcatcgcccaggaagggtgtcactgacactgttaccaagtatgatatcagaattcgtgcgcttcaaccttcttccggtgttgcttctctgtgactgagtgtgtttcttctacaactgtatattgtagaaaattcttcaaagtatcagtactgttttcataaggtgggttcggctttttctttctttctcaaattgtacagtaatttaacaatttgccttttttttttttttttgtttctgagaatattgaggttaaatatgaatttcacttgctcatgttcatc

SEQ ID NO: 554 - protein, 162 aa, Zea mays
  misc_feature: Ceres Clone ID no. 1384304
  misc_feature: Bit score of 368.1 for HMM based on sequences of Figure 1
MDRSASVGIKDGGFGGNHLYSPSFSSSSSMRHVNYSCGSCGYELNLSSTNRITSSIGSKYGKSMKTGIISFFNIDEGRFSQVDEFQCMPHFSRYSWGLFRRKTKLLCRQCNNYIGNASYDKAPPEYALVTQNSSPRKGVTDTVTKYDIRIRALQPSSGVASL

SEQ ID NO: 555 - DNA, 495 bp, Arabidopsis thaliana
  misc_feature: Ceres Annot ID no. 564098
  misc_feature: Encodes the peptide sequence at SEQ ID NO. 556
atggagagatcagcgtcggtgggtgttaacgacggccgttttggtggcaaccaattctattcgccatctttctcttcttcttcttcttcttcttccatgagacatgttaattacagttgtggatcttgtgggtatgaactaaacctgagctccacgaatcgaatcacatcgacaatcggatcaaagtacggtaaatccatgaagagtgggatcatatctttcttcaacatcgacgagggaagattcagtcaggtcgatgagttccaatgcatgcctcacttctctagatactcttggggtttgtttcgacacagaacgaagcttctatgtcgcaaatgtaataattatatcggcaatgcttctcaggagaaggctcctgagtatgcacttgttacacaaaactcggatccgacatcgcctaggattggtagtgttacgaagtacgatatcagaatccgctcgcttcaaccttcttctgcggtcgctttgctgtga

SEQ ID NO: 556 - protein, 164 aa, Arabidopsis thaliana
  misc_feature: Ceres Annot ID no. 564098
  misc_feature: Bit score of 378.1 for HMM based on sequences of Figure 1
  misc_feature: Functional Homolog Of SEQ ID NO. 554
MERSASVGVNDGRFGGNQFYSPSFSSSSSSSSMRHVNYSCGSCGYELNLSSTNRITSTIGSKYGKSMKSGIISFFNIDEGRFSQVDEFQCMPHFSRYSWGLFRHRTKLLCRKCNNYIGNASQEKAPEYALVTQNSDPTSPRIGSVTKYDIRIRSLQPSSAVALL

SEQ ID NO: 557 - DNA, 495 bp, Populus balsamifera subsp. trichocarpa
  misc_feature: Ceres Annot ID no. 1443290
  misc_feature: Encodes the peptide sequence at SEQ ID NO. 558
atggaaaaatctaaggttggcaagggagcttacctcaacgggaatccccatcattccttctcttcttcctctgcttctcaaagacatgtcagctacagctgcggtatttgcgggtatgaattgaacttgagctcctccaatcggaacacctcatctattggctctaaatatgggaaatccataaagagagggatcatctcattcttcttcatcgatgagagcagatttacccaggttgatgaattccaatgcattcccttcttttcaagaaactcctggggtttgttccaccggagaacagcacttctttgccgcaagtgtggtaataatattggaattgcttatgatgataaagcctcagcttatccacttgtagcagacggatctgactcttcctcagtcagtgaagtttccaaacatcgaaaatatgatgttaaaatccgtgccttgcagccttcttctgttgaccagtttagcactccaattcacacctga

SEQ ID NO: 558 - protein, 164 aa, Populus balsamifera subsp. trichocarpa
  misc_feature: Ceres Annot ID no. 1443290
  misc_feature: Bit score of 417.4 for HMM based on sequences of Figure 1
  misc_feature: Functional Homolog Of SEQ ID NO. 554
MEKSKVGKGAYLNGNPHHSFSSSSASQRHVSYSCGICGYELNLSSSNRNTSSIGSKYGKSIKRGIISFFFIDESRFTQVDEFQCIPFFSRNSWGLFHRRTALLCRKCGNNIGIAYDDKASAYPLVADGSDSSSVSEVSKHRKYDVKIRALQPSSVDQFSTPIHT

SEQ ID NO: 559 - DNA, 936 bp, Glycine max
  misc_feature: Ceres Clone ID no. 1042157
  misc_feature: Encodes the peptide sequence at SEQ ID NO. 560
attatcttcttcttctctacctttcgatcctttcactttggcgtgaccgaaccattccactccctcgcaaaacggtgtcgtgccgatcgcgttcgttcggttaaactcgcgcgttcagaatcctccggaacaacgctcttcgcccaattccctataattcactcctctctctctctcgctttctctggtaacctcctcgcgacggtggctcttccgcattccgccgccgccactgccatcgccgttgccgccgccggaaaacactaatcaatagatggatgattctgcgttcaaacgaggcggtcactttaatcgaacttactcgtgctcttctcagagagatgtctgttacagctgtggcacttgtggttatgagctgaacctatcctcctcaaaccggaacactgcatccattggatctaaatacgggaagtccataaagcgaggtattatatcattcttcagcattgatcttagcagatttactcaggttgatgaaattcagtgtgtgccccattttgataagcactcatggggtttgtttcgccgaagaaccaagcttctttgtcgcaagtgtggcaaccatattggaaatgcatacaatggttacacttcgtcctttcctcttgtgtcagacggagcagaatcatctcctagttccaaagtggtcagtcatacaaaatatgacattcgcatttgtgccttacaaccttcatcttctgaagaatctggaatccccgtgtttgcttgaactacctggtaaaaatagtaattcctacacagccaaatccggtgacagggtggttagaagttcattaatatatgcagatggtttggcttgttttttgtgcttttcctaatgaaaatgtgactaatagtcgtgtgaaagagttgtaagaattaaattaaaaattattacaggtgtgggattttatg

SEQ ID NO: 560 - protein, 158 aa, Glycine max
  misc_feature: Ceres Clone ID no. 1042157
  misc_feature: Bit score of 404.0 for HMM based on sequences of Figure 1
  misc_feature: Functional Homolog Of SEQ ID NO. 554
MDDSAFKRGGHFNRTYSCSSQRDVCYSCGTCGYELNLSSSNRNTASIGSKYGKSIKRGIISFFSIDLSRFTQVDEIQCVPHFDKHSWGLFRRRTKLLCRKCGNHIGNAYNGYTSSFPLVSDGAESSPSSKVVSHTKYDIRICALQPSSSEESGIPVFA

SEQ ID NO: 561 - DNA, 994 bp, Gossypium hirsutum
  misc_feature: Ceres Clone ID no. 1919714
  misc_feature: Encodes the peptide sequence at SEQ ID NO. 562
gagcgcgttccctcttctctagaaactgctgctgtttttttttcatccttttaactcagtccctgaaaattgagccgttaacgtcaacccgattcaggcggaaccgtttcctcactcaaaatcctcgcacaaactcagcagttaattaaacacttcataaagttgagtcgctttattagcacagttgccgttatagtgataatcaaaggtgttgattctgtaggaagaaggaaaaaagtaatggagaaatctgtttttgttaaagatgtacaacaactcaatggaaatctccaccattctttttcctctgtttctcaaagagatgtaacttacagctgtggttcttgtgggtatgagctaaacctaagttcctctagtagaaacaccgcaacaatcggctctaaatatggaaaattgattaagcgagggatgatatcattcttcaatatagacgagaccagatttacgcaggtcgatgaattccaatgcagaccctacttttcgaagcactcatggggtttattccgccatagaaccaaattactttgtcgcaagtgtgggaaccacattggcgatgcttatgatgataaatcttctggctaccctcatgtcttagatggttctgattcatcctccggcactgaaccttctaaccatagaaaatatgatgttagaatccgtgccctacagccttcgactgctgaaggactcggctctccactttttgcgtgatttcctgcagtgcatcattgatggtcttcggtttgaattatcaacgactgactgagcgttttcgtatgggattattgctgtctattagttggtttgagtcttccattttatgctgtctttgctgtgtttctgttaagtgtatatatgaaaggtaagtaatgtggagctttaaaatgaggttgagcacagtaatgtcattacccaaatttaagtgtaatatctgtttgagttgaattaaatcaagtatttttcttttggcctt

SEQ ID NO: 562 - protein, 163 aa, Gossypium hirsutum
  misc_feature: Ceres Clone ID no. 1919714
  misc_feature: Bit score of 433.3 for HMM based on sequences of Figure 1
  misc_feature: Functional Homolog Of SEQ ID NO. 554
MEKSVFVKDVQQLNGNLHHSFSSVSQRDVTYSCGSCGYELNLSSSSRNTATIGSKYGKLIKRGMISFFNIDETRFTQVDEFQCRPYFSKHSWGLFRHRTKLLCRKCGNHIGDAYDDKSSGYPHVLDGSDSSSGTEPSNHRKYDVRIRALQPSTAEGLGSPLFA

SEQ ID NO: 563 - protein, 164 aa, Vitis vinifera
  misc_feature: Public GI ID no. 157336039
  misc_feature: Bit score of 402.2 for HMM based on sequences of Figure 1
  misc_feature: Functional Homolog Of SEQ ID NO. 554
MENSMVLAHETQPHRDFSASSLRDVSYSCGSCGYELKLCSSNRNTKNIGSKYGKNIKRGVISFLQVDESRFTLVDEFKCIPYFISRHSWGLFCHRTKLLCRKCSNHVGNAYVRKSPYPLVLDESDSAPAPATATTDISTCRKYDIRLRALQPSSSEPSAIPLLT

SEQ ID NO: 564 - DNA, 459 bp, Solanum lycopersicum
  misc_feature: Ceres Annot ID no. 8454153
  misc_feature: Encodes the peptide sequence at SEQ ID NO. 565
atggacatcagtcatgacttagcaaaagttgattcgatgccaaacaaaaactcatctccctgctgtggcagttgtgggtatgagttaaatcttaattcatcaagtcgcaatactgcttccattgggtccaagtatgggaagtccattaagaaagggatgatctccttcttgtccattgatgagagcagatttacccaggttgatgaattcaagtgtgtaccgttctttttctccaaacgttcttggggcttgttccagcggcgaacaaaacttcagtgcagaaaatgtggtaacgatattggaattgcttatgatgatagtgcttcttcttacccacttgtagccgatgcatcagatacagcctccggtagtgaaataaccactcataggaaatacaatatcaaaatccgctcgttgcaaccgtcttcctcagcatcgggtactcctctccctgagtga

SEQ ID NO: 565 - protein, 152 aa, Solanum lycopersicum
  misc_feature: Ceres Annot ID no. 8454153
  misc_feature: Bit score of 376.0 for HMM based on sequences of Figure 1
  misc_feature: Functional Homolog Of SEQ ID NO. 554
MDISHDLAKVDSMPNKNSSPCCGSCGYELNLNSSSRNTASIGSKYGKSIKKGMISFLSIDESRFTQVDEFKCVPFFFSKRSWGLFQRRTKLQCRKCGNDIGIAYDDSASSYPLVADASDTASGSEITTHRKYNIKIRSLQPSSSASGTPLPE

SEQ ID NO: 566 - DNA, 1007 bp, Oryza sativa
  misc_feature: Ceres Annot ID no. 1722302
  misc_feature: Encodes the peptide sequence at SEQ ID NO. 567
agagccagccgagccagcgcggcgcggtcgcctttgccctgccctgcactgaccgttggagagccaagcaacccaacccaagcgctcttctcttctcctcctcttcctcccaaatcgatcgggatccgatgcgcacggaggaggaaggagcatggtgaggacgcccgagaggagctactcctgctcctccgccaaggaagtcgcctacagctgtggttactgtggctatgcattgaacctgagctcctcaacacggaacacagcgaacattggatccaagtatggtaagcagatcaggaaaggtgtaatctcattctttgcgatcgacgagagtcggttcacacaaactgatgaggtgagctgcatgccatacttccattcaaggcgctcctggggtttgttcagaaagaggacaaggttgatctgccgcaaatgtggtggccgtatcggtaatgcttatgaggatgaggattccacattgtatgatggttcagatgatttgcacatgagctccgagggctacagcatgtcgagtggaaagaaatatgttatcaagattaatgcactgcagccttcaaccgatgactctggtgttcccttcaccctgtgatgctgttctgaacttctgcagtatgcacttttcgattcttgccttgcgctatactggactgtcaatcaagtaactgcagaaccaagagattacgtgctagtgtgtaactgtatattttgataggaatgctgaattttgcctacctgtatttataaaatggaagagtttgttgtctatttacatatacattcagagttcagtgggtgtgcaactgtgcatcatggacctggatttggcaatccatatttgggcaaatgtttagttagaaatcaggtttctgatgatgttcagtggtgtgtacttgtgtcttgtactgaaatattgtagtgtcttttgattttttgtgtatctaaagaatgatgtaaatcttcagctattctaaacggcagtttttttt

SEQ ID NO: 567 - protein, 152 aa, Oryza sativa
  misc_feature: Ceres Annot ID no. 1722302
  misc_feature: Bit score of 374.0 for HMM based on sequences of Figure 1
  misc_feature: Functional Homolog Of SEQ ID NO. 554
MVRTPERSYSCSSAKEVAYSCGYCGYALNLSSSTRNTANIGSKYGKQIRKGVISFFAIDESRFTQTDEVSCMPYFHSRRSWGLFRKRTRLICRKCGGRIGNAYEDEDSTLYDGSDDLHMSSEGYSMSSGKKYVIKINALQPSTDDSGVPFTL

SEQ ID NO: 568 - DNA, 450 bp, Sorghum bicolor
  misc_feature: Ceres Annot ID no. 8733140
  misc_feature: Encodes the peptide sequence at SEQ ID NO. 569
atggcgagggccctcgaccgctacacctccggcaaggatgtcgcctacagttgtggatactgtggctatgcattaaacttgagctcctccgcacggaacacagcgaacattggatccaagtatggcaagcacatcaggaaaggcgttgtctcattctttgcaatcgatgagagccgttttacacaaactgatgaggtgagctgcaccccgtacttccattcaagccattcatggggattcttcagaaatagaacacggttgctctgccggaagtgcagtggtcatattggtaatgcttatgaagatgaggatcccaccttgtgcgatgggtcagatgacctggacatgagctccaagggcagcagcacatcccctcggaagaaatatgttattaagatcaatgcactgcagccctcatcagatgactctggagctctcttctccccgtga

SEQ ID NO: 569 - protein, 149 aa, Sorghum bicolor
  misc_feature: Ceres Annot ID no. 8733140
  misc_feature: Bit score of 356.4 for HMM based on sequences of Figure 1
  misc_feature: Functional Homolog Of SEQ ID NO. 554
MARALDRYTSGKDVAYSCGYCGYALNLSSSARNTANIGSKYGKHIRKGVVSFFAIDESRFTQTDEVSCTPYFHSSHSWGFFRNRTRLLCRKCSGHIGNAYEDEDPTLCDGSDDLDMSSKGSSTSPRKKYVIKINALQPSSDDSGALFSP

SEQ ID NO: 570 - DNA, 495 bp, Populus balsamifera subsp. trichocarpa
  misc_feature: Ceres Annot ID no. 1452096
  misc_feature: Encodes the peptide sequence at SEQ ID NO. 571
atggaaaaatctacggctttcagggaagcttacctcaacgggaatcaccatcattccttttcttcttcctctgcttctcatagacatgttagctacagctgcggtatctgcgggtatgagttgaacttgagctcctccaatcgaaacacgtcaacaattggctctaaatatgggaaatccataaagcgagggaaaatctcattcttcttcatcgatgagagtagatttactcaggttgatgaattccaatgctttcccttcttttcaaaaaactcccttggtttgttccgccagagaactgcacttctttgccgcaagtgtggtaatcacattggaattgcttatgctgatgaagcttcagcttatccacttgtagcagacggatctgactcttcctcagtcagtgaagttttcaaacgtcgaaaatatgatgttaaaatccgtgccttgcagccttcttctgccgagcagtttagcattccactttacacctga

SEQ ID NO: 571 - protein, 164 aa, Populus balsamifera subsp. trichocarpa
  misc_feature: Ceres Annot ID no. 1452096
  misc_feature: Bit score of 385.9 for HMM based on sequences of Figure 1
  misc_feature: Functional Homolog Of SEQ ID NO. 554
MEKSTAFREAYLNGNHHHSFSSSSASHRHVSYSCGICGYELNLSSSNRNTSTIGSKYGKSIKRGKISFFFIDESRFTQVDEFQCFPFFSKNSLGLFRQRTALLCRKCGNHIGIAYADEASAYPLVADGSDSSSVSEVFKRRKYDVKIRALQPSSAEQFSIPLYT

SEQ ID NO: 572 - DNA, 897 bp, Glycine max
  misc_feature: Ceres Clone ID no. 1645639
  misc_feature: Encodes the peptide sequence at SEQ ID NO. 573
ccttcattcatctcaaaatgaaaaattccgtgtttaacaacaaagcacaagttcaccaaaatcgaacttgctcctcctattcctattcctactcttctcagagggatgtctgctacagttgtggtacatgcgggtatgagcttaacctatcctcctctaaccggaatatatcatccatcggttcaaaatatgggaaatccataaagcgaggcattatatcattcctcaacgttgatgacagcagattcacccgcgccgatgaaattgaattcgccccatatttttcaaagcacaagtggggtttgttccgccgaaaaaccaagcttctttgtcgcaagtgttgcaaccatattggatatgcctacaacgatcgcacttcatcattttttcccttcgtatcaaacagaacagaaccatcaccacccaccgaagcatcaaattcaagtccaatgaaatacgatattcgcattcgtgctttacaaccttcatcttctcaagaacatggaatcactgtgttggcttaaaatttcaaatacgcggtaaaaaattgttatcactaactacggggaggttgtgatttcattttttttttttttttatagatttgaagttctgttttggcaagggtgttgtgttcccctttccctgtgtctcaagtgtgattaatatacacttgtatactagaagtagtagctgtggaatttttggaatgttaagttaaattttgcaaaacaacgaagatagaaagaatatttatggtggtgctacttcgtaaatcagaagatattatctagttttgaatagtcagatatcaggagtggattgcccggcctcacaatgtatgaatataatgttgatatataatcgtatattgtatggtataatattattttcagc

SEQ ID NO: 573 - protein, 168 aa, Glycine max
  misc_feature: Ceres Clone ID no. 1645639
  misc_feature: Bit score of 298.1 for HMM based on sequences of Figure 1
  misc_feature: Functional Homolog Of SEQ ID NO. 554
MKNSVFNNKAQVHQNRTCSSYSYSYSSQRDVCYSCGTCGYELNLSSSNRNISSIGSKYGKSIKRGIISFLNVDDSRFTRADEIEFAPYFSKHKWGLFRRKTKLLCRKCCNHIGYAYNDRTSSFFPFVSNRTEPSPPTEASNSSPMKYDIRIRALQPSSSQEHGITVLA

SEQ ID NO: 574 - protein, 154 aa, Vitis vinifera
  misc_feature: Public GI ID no. 157344920
  misc_feature: Bit score of 220.8 for HMM based on sequences of Figure 1
  misc_feature: Functional Homolog Of SEQ ID NO. 554
MEMLAGEDDRSSGFHHLHLSCSLRDVHYSCGSCGYQLNLNSCNRTSVLGSKYEKSIKKGIISFFSIDETRFTQTNELRCLPYFNSRCSWGLFRRRSKLLCKKCGNHIGNAYKTNNRSGKLDSSAWDGISDSSRIYDIKICALQPSSSLESDAFV

SEQ ID NO: 575 - protein, 157 aa, Oryza sativa subsp. japonica
  misc_feature: Public GI ID no. 115440865
  misc_feature: Bit score of 302.5 for HMM based on sequences of Figure 1
  misc_feature: Functional Homolog Of SEQ ID NO. 554
MVRSLDSYPSIKDVTYSCGYCGYALNLSSSTRNTANIGSKYGKQIKKGVVSFFAVDESRFTQADEVTCVPYFHSRRSWGLFRRRSRLLCRKCGGRIGSAYEEDEPAAAALPACDGPDDLRTTSSGSSGSASSQKNYVIKINALQPSSDDSDAVAFTL

SEQ ID NO: 576 - DNA, 761 bp, Zea mays
  misc_feature: Ceres Clone ID no. 340925
  misc_feature: Encodes the peptide sequence at SEQ ID NO. 577
ggccaagccaagcaatcaagcgggggtgtcggtccgccgagcggagggcgagcatggtgagggccctcgaccgctactcctccggcaaagatgtcgcctacagctgtggatactgcggcttcgcgttgaacttgagctcctccacgcggaacacggccaacattgggtccaagtacggcaagcacatcaggaaaggcgtcgtctccttcttcgcgatcgacgagagccgcttcacgcaggccgacgaggtgagctgcacgccgtacttccgctccagccgttcgtggggcttcttcaggaacaggacgcggctgctctgccggaagtgcggtggccacactggttatgcctacgaagacgagggtcccgccctgcgcgacgaggggccagcagatgacctggacatgagctccagctccaggggaagcagcacgtcccctcggaagaagtatgttatcaagatcagtgcgctgcggccgttatcagacgactctggtgctctcctctccccgtgatggcgatctggattctgagctgcagccatgtgtaaattaagggatagtggttctcttcagttacttcgtgagcagaatttttttggtttattgtacgttacaagttacatcatgttcatatttattttgtgtaataaggtgtggttgatgtaatatcttgtttatgattaggtcatggagataatagacatctagctttagcattgatgttcctgtttgctagtcagtaaattaagggatttgatc

SEQ ID NO: 577 - protein, 153 aa, Zea mays
  misc_feature: Ceres Clone ID no. 340925
  misc_feature: Bit score of 299.1 for HMM based on sequences of Figure 1
  misc_feature: Functional Homolog Of SEQ ID NO. 554
MVRALDRYSSGKDVAYSCGYCGFALNLSSSTRNTANIGSKYGKHIRKGVVSFFAIDESRFTQADEVSCTPYFRSSRSWGFFRNRTRLLCRKCGGHTGYAYEDEGPALRDEGPADDLDMSSSSRGSSTSPRKKYVIKISALRPLSDDSGALLSP

SEQ ID NO: 578 - DNA, 516 bp, Sorghum bicolor
  misc_feature: Ceres Annot ID no. 8669404
  misc_feature: Encodes the peptide sequence at SEQ ID NO. 579
atggacaggtctctcgacagaaactcctccatcaaggacgtcacttatagctgcgggtactgcggctacgcgctgaacctgagctcctcggcgcgggacacggagggcatcgggtgctccaagtaccgcaagcagatcaagaagggcgtcgtcgccttcgtcgcggtggacgagacccggttcacgctcgccgacgaggtcacctgcatgccctacttccgctccgcccgctcctggggcctcttcaggaggcgggcgcgcctgctctgccgcaagtgcggcggacgcatcggcaacgcctacgaggaggaggacgacgccagggactactccagctccagcctcttcgacggcgacggcgacggctcctcggatgacatgcgccggagctccggcttgggctcgggccgcagcagcatcgtgtcgtcgagccagaagaactacgtgatcaagatcagcgcgctgcagccgtcgtcagatgattctgctgctgttgttcccttcacacatcgatga

SEQ ID NO: 579 - protein, 171 aa, Sorghum bicolor
  misc_feature: Ceres Annot ID no. 8669404
  misc_feature: Bit score of 236.2 for HMM based on sequences of Figure 1
  misc_feature: Functional Homolog Of SEQ ID NO. 554
MDRSLDRNSSIKDVTYSCGYCGYALNLSSSARDTEGIGCSKYRKQIKKGVVAFVAVDETRFTLADEVTCMPYFRSARSWGLFRRRARLLCRKCGGRIGNAYEEEDDARDYSSSSLFDGDGDGSSDDMRRSSGLGSGRSSIVSSSQKNYVIKISALQPSSDDSAAVVPFTHR

SEQ ID NO: 580 - DNA, 619 bp, Gossypium hirsutum
  misc_feature: Ceres Clone ID no. 100028078
  misc_feature: Encodes the peptide sequence at SEQ ID NO. 581
attcagagaggatgtcccaagctcacgtctcttacagctgtggatcttgtggttaccctttgaacttgacctcttccaatcgaatcgccaccagcataggctctgaatatcgcaaatccgtagagaaaggtcttatctcctttctatctgttgatcttagtcgattcacacaagtcgacgaggtacattgctttcctgtcagttggggccgtcatcgatcaaaaactaaactactttgccgtaaatgtggggttcatgtagggtatgggtatggagatgcgcctgccctttgtggttttgactctcccgactcatctagtgctgcttttaggaagtttacaataaagatccgagctctacagccttcagacgagtgctaacaaggttgacatgggagattctttatggacggtgttacttcgatcatgctcctacctgatgattgcctctgttttattttcaattttcttgactgtaggaatgaccgtgaatcatttggcctaacttgccaccgctggcttaatattcaaaacttgaatcgtcggtccttgcaatttccatgttctttcggcattgttggcccttcctcgttatctcagagctgtaccgatatcaactc

SEQ ID NO: 581 - protein, 122 aa, Gossypium hirsutum
  misc_feature: Ceres Clone ID no. 100028078
  misc_feature: Bit score of 148.3 for HMM based on sequences of Figure 1
  misc_feature: Functional Homolog Of SEQ ID NO. 554
MSQAHVSYSCGSCGYPLNLTSSNRIATSIGSEYRKSVEKGLISFLSVDLSRFTQVDEVHCFPVSWGRHRSKTKLLCRKCGVHVGYGYGDAPALCGFDSPDSSSAAFRKFTIKIRALQPSDEC

SEQ ID NO: 582 - DNA, 471 bp, Populus balsamifera subsp. trichocarpa
  misc_feature: Ceres Annot ID no. 1503869
  misc_feature: Encodes the peptide sequence at SEQ ID NO. 583
atggaatcatggattgggtttagatgtgtgcttgaaatagtgtgttcatttcttcgaaaaagaaagaaaagctgcggttcttgtgggtatcagttaaacttgaactcttgcaaccggaacactccagatattggagttaattacaagaaatccataaagaaaggaagtatttcattcttcagcattgatgaaaccaggttcactcaaattgaagaacttcgatgtacaccatacttcaattccatgcgttcctggggtttattccagcgaagaaccaagcttctttgttacaaatgtggaaatcatcttgggattgcttacaaagagaataatacctcttcctcccctctcagattggggaaatgtcgatcagatttgatctcttgggatgggatttctgatgccagaatttatgttatcaagatacgttccttgcagcctgcttctactgaggactatagtttgagctga

SEQ ID NO: 583 - protein, 156 aa, Populus balsamifera subsp. trichocarpa
  misc_feature: Ceres Annot ID no. 1503869
  misc_feature: Bit score of 190.6 for HMM based on sequences of Figure 1
  misc_feature: Functional Homolog Of SEQ ID NO. 554
MESWIGFRCVLEIVCSFLRKRKKSCGSCGYQLNLNSCNRNTPDIGVNYKKSIKKGSISFFSIDETRFTQIEELRCTPYFNSMRSWGLFQRRTKLLCYKCGNHLGIAYKENNTSSSPLRLGKCRSDLISWDGISDARIYVIKIRSLQPASTEDYSLS

SEQ ID NO: 584 - DNA, 453 bp, Populus balsamifera subsp. trichocarpa
  misc_feature: Ceres Annot ID no. 1525651
  misc_feature: Encodes the peptide sequence at SEQ ID NO. 585
atgacaaaagaatttactgggggtggtcctttcaatcaaccagatcctgctaaaggggagcgtaaaacaaggcaatctgcaagaattaagcttctgtttgagctgcaaagctgtggctcttgtggataccccttgaatttaacatcttccaatcgaatcacctccaacataggttctggatatcagaaatctataaagaaaggttatatctccttcctttctgttgatcttagtcgattcacacaggttgatgaggtaaactgtcttcctgtgtcttggggtcgttatcattcaaaaagtaaacttctttgtcgtaaatgtggggttcacgtaggctatggatatggagattcgcccgctctatgtggttttgactctcccaactcatcaagctcagcttataaaaaatttaccataaagatccgagctctacagccttcagaagagtgctaa

SEQ ID NO: 585 - protein, 150 aa, Populus balsamifera subsp. trichocarpa
  misc_feature: Ceres Annot ID no. 1525651
  misc_feature: Bit score of 143.5 for HMM based on sequences of Figure 1
  misc_feature: Functional Homolog Of SEQ ID NO. 554
MTKEFTGGGPFNQPDPAKGERKTRQSARIKLLFELQSCGSCGYPLNLTSSNRITSNIGSGYQKSIKKGYISFLSVDLSRFTQVDEVNCLPVSWGRYHSKSKLLCRKCGVHVGYGYGDSPALCGFDSPNSSSSAYKKFTIKIRALQPSEEC

SEQ ID NO: 586 - DNA, 1076 bp, Panicum virgatum
  misc_feature: Ceres Clone ID no. 2031281
  misc_feature: Encodes the peptide sequence at SEQ ID NO. 587
aaatcgcccgaggaaaagcgcgcggcagggcaggagacgccgatcccccgtgtccgttggcgagcgagaccgaggcccgaccaaacaaccgccccgcctttttagccagccggccgttcgtcgcccccgctctcccccccactcgccccacgtctcctctgtctctccgatcggcaggagggaaaagtggacggctccagcgaagcgagcgccaccgtcgccttcgcctcgccatggagaggtctctcgacagcagctactccgcctccatcaaggacgtcacatacagctgcgggtactgcggctacgcgctgcacctgagctcctcggcgcgggacacggcgggcatcggctccaagtaccgcaagcagatcaagaagggcgtggtcgccttcgtcgccgtcgacgagagccgcttcacgctcaccgacgaggtcacctgcatgccctacttccgctccaggcgtgcctggggcctcctcaggaagcgttcgcgcctgctctgccgcaagtgcggcggccgcatcggcgacgcctacgaggaggaggacagggactccggcctcagcgacggcgacgccttctcggacgacctgcgcgcgagcttgggctccggtggcagcggcagcagcgcgtcgagccagaggaactacgtgatcaagatcagcgcgctgcagccgtcgtcagacgattctgacgcagctgccttcacactatgatgaagatagatggcgtcgggttgctgcaaggcgctcttcttccagcttggttgaattcgacttttgtgttatcagggatgcgactttgtaagcgcgggaggaaatacagcaagaaagagcttggcacagctgagaacttttcagatggtaaccaactgcatgctgttttcagacatcttgctgtcagtagtgctcttcgtttcctatgtaaatttgtgaaatgtacagcttggttattgaatttttctttgtattaggaaatgattaggtttgctgtatgttagttgatcccatagaatttgtactgtgtcataactcatgatccaccacggttgcaattttgagtagtcttgcttc

SEQ ID NO: 587 - protein, 161 aa, Panicum virgatum
  misc_feature: Ceres Clone ID no. 2031281
  misc_feature: Bit score of 255.8 for HMM based on sequences of Figure 1
  misc_feature: Functional Homolog Of SEQ ID NO. 554
MERSLDSSYSASIKDVTYSCGYCGYALHLSSSARDTAGIGSKYRKQIKKGVVAFVAVDESRFTLTDEVTCMPYFRSRRAWGLLRKRSRLLCRKCGGRIGDAYEEEDRDSGLSDGDAFSDDLRASLGSGGSGSSASSQRNYVIKISALQPSSDDSDAAAFTL

SEQ ID NO: 588 - DNA, 1157 bp, Zea mays
  misc_feature: Ceres Clone ID no. 483742
  misc_feature: Encodes the peptide sequence at SEQ ID NO. 589
aggatacctgattaaagaattgcttaactagcagcggcgcaaagcctcggccggaggccaatcctccgtgtccggtcgggcgcaacccgaccaaacaacttccttttaagcaaaccgctcgcgttcctgaattcctgacccccgctctctctcccccacccgcactcgccccacgtctcctctctcccgtcccgtctgctctctgatcagcaggagagaaaggtggatgcgccagcgaagcgagcaccgtccctaatcgtcggccatggagaggtctctcgacagctactcctccatcaaggacgtcacctacagctgcgggtactgcgggtacgcgctgaacctgagctcctcggcgcgggacacggagggcatcgggcccaagtaccgcaagcagatcaggaagggcgtcgtcgccttcgtcgcggtcgacgagagccggttcacgctggcccacgagctcacctgcacgccctacttccgctccgcccgctcctggggcctcttcaggaggcggtcgcgcctgctctgccgcaagtgcggggggcacatcggcagcgcctacggctacggggaggaggaggaggacgccagggactccagctcctccagcctcttcggcggtgacggctcctcggatgacacgcgcccgagctccggctcgggccgcagcagcgtcgcgtcgagccagaagagctacgtggtcaggatcagcgcgctgcagccgtcttcggatgactctgctgtcgttcccttcacgcatcgatgatgcattgcaggtgtcgagttggtgtgccgtgttcttcttccagcctggatgaatttgaatttgctgtaacctgggatggcgatggactgcaggaggacgaagtggagcaagggaagatatttcttggcgtgtctagacttttcagaggtttgatcagctgcatgctgctttcagtcatcttgctgtttgtaatgcctctgtgtttcctctgtacattggtaagtatagagcaacatggtttttgaaattttggttggtgtcgtgtaaatgattaaaggttttctgtatttcgattgattctatagcgtttgtattatgtcatagaattgaaattttgattagtcttgtactcttgtctcgcttgcatgtgtggatgttttagcttccc

SEQ ID NO: 589 - protein, 167 aa, Zea mays
  misc_feature: Ceres Clone ID no. 483742
  misc_feature: Bit score of 231.0 for HMM based on sequences of Figure 1
  misc_feature: Functional Homolog Of SEQ ID NO. 554
MERSLDSYSSIKDVTYSCGYCGYALNLSSSARDTEGIGPKYRKQIRKGVVAFVAVDESRFTLAHELTCTPYFRSARSWGLFRRRSRLLCRKCGGHIGSAYGYGEEEEDARDSSSSSLFGGDGSSDDTRPSSGSGRSSVASSQKSYVVRISALQPSSDDSAVVPFTHR

SEQ ID NO: 590 - DNA, 674 bp, Zea mays
  misc_feature: Ceres Clone ID no. 100802111
  misc_feature: Encodes the peptide sequence at SEQ ID NO. 591
cgcgccccactccccagacgccgtcgcctagatccatgagacttcccgatcttcctgcggcccgaggatgtcccagagcgacgtcgactacagttgcggatcttgtggataccctctaaacctttcatcttctaaccgaagcacatctgaagtaggctcatataagaagtctctgaagaaaggactgatttcattcatttctgttgatctcagccgatttactcaggtggacgaggtatcttgctttcccctcacctggcgtggttacaggccaaaaactaagcttctgtgccgaatatgtggggcatctattggctacggatacggtgagccggctgttttgtgtagttttgatccagcaagttcatcttcctccagtacatcccagaagtatttaataaagatccaagcactccaaccttcagacaggactcagtaagtgaaatatggaaagagaggaaataggtgtcagcctagagaactccatcagttacctatctgatgattgcttgctttctatatttaacaagctagaaagcgggtcagagaggagtgctttcggtttaacttgcaagaattggttcaaggttcggaaccttggccggaaatcactaacattccattgttcttttaatcctgccatagacaaggagcatgccaagtgcatccccaag

SEQ ID NO: 591 - protein, 123 aa, Zea mays
  misc_feature: Ceres Clone ID no. 100802111
  misc_feature: Bit score of 137.0 for HMM based on sequences of Figure 1
  misc_feature: Functional Homolog Of SEQ ID NO. 554
MSQSDVDYSCGSCGYPLNLSSSNRSTSEVGSYKKSLKKGLISFISVDLSRFTQVDEVSCFPLTWRGYRPKTKLLCRICGASIGYGYGEPAVLCSFDPASSSSSSTSQKYLIKIQALQPSDRTQ

SEQ ID NO: 592 - DNA, 799 bp, Triticum aestivum
  misc_feature: Ceres Clone ID no. 1460255
  misc_feature: Encodes the peptide sequence at SEQ ID NO. 593
atcagctcgccaccagcaagcaaccgctctttttagtccccactcgctccacgatccctcccccactccggccggccacgcgcaaagcgaaacgctccccgactccggccaagagctccagcgccgccgccgccgaccgtcgttcgtccatatggtgaggtccaactccatcgacagctgctactcctccatccaggacgtcacctacagctgcgggtactgcggctacgcgctgaacctgagctcggcggcgcggaacacggccaacatcggctccaagtacggcaagcagatcaggaagaagggcatcgtggccttcgtcgccgtcgacgagacgcgcttcacgcaggccgacgaggtcacctgcgcgccccgcctccgcccctggacctggcgcctcttccggcggaggtcgcgcctgctctgcggcaagtgcggcggccgcatcggcgccgcctacgaggtcgacgaggaggacgaggaccccgccggcctctccgcgtgcggcggctcggacgacgacgacgacgacctgcggacgagcccgggcgatgatgtcggcgcgtccagaaggaggaactacctgatcaggatcggcgcgctgcagccctcgacggacgatcctcctcctgccgatcccttctctctatgatatgatatgatattgatatgacacaccgctgctgaattttgttcctttgttcatagtggaagacgacccgagagcttgatgtgtgtaagttgatcctgctatagtttttgtgtcctggtaatggagtgagccatggttgcaattttg

SEQ ID NO: 593 - protein, 166 aa, Triticum aestivum
  misc_feature: Ceres Clone ID no. 1460255
  misc_feature: Bit score of 204.0 for HMM based on sequences of Figure 1
  misc_feature: Functional Homolog Of SEQ ID NO. 554
MVRSNSIDSCYSSIQDVTYSCGYCGYALNLSSAARNTANIGSKYGKQIRKKGIVAFVAVDETRFTQADEVTCAPRLRPWTWRLFRRRSRLLCGKCGGRIGAAYEVDEEDEDPAGLSACGGSDDDDDDLRTSPGDDVGASRRRNYLIRIGALQPSTDDPPPADPFSL

SEQ ID NO: 594 - DNA, 870 bp, Arabidopsis thaliana
  misc_feature: Ceres Clone ID no. 26006
  misc_feature: Encodes the peptide sequence at SEQ ID NO. 595
aaaaagtacgaaaggaaaatatgagtgaggagaagaggaagcaacacttcgtgctagtacatggtgcgtgccacggcgcatggtgctggtacaaggttaagcctcttctcgaggctttgggccatcgtgtaaccgccttagacctagctgcttccggtatagacacaaccaggtcaatcactgacatttctacatgtgaacaatattctgagccattgatgcagctaatgacttcattgccgaatgatgagaaggttgtactcgttggtcatagctttggaggtttgagtttagccttagccatggataagtttcccgataaaatctctgtctctgtcttcgtgactgcattcatgcccgacaccaaacactcaccatcgttcgtcgaggaaaagtttgcaagcagcatgacaccagaaggatggatgggctctgagctcgagacatatggttcagataattccggcttgtctgtgttcttcagcaccgacttcatgaagcaccgtctctaccaactttctcctgtggaggatcttgagcttggattgcttctaaagaggcctagttcattgtttattaatgaattatcgaagatggagaacttttctgagaaagggtatggatctgttcctcgagcttacattgtgtgcaaagaggacaacattatctcggaagaccatcaacgatggatgatccataattatccggcgaatttagtgattgagatggaagagacggatcatatgccaatgttttgcaaacctcaagtactaagtgaccatctattggcaatcgctgacaatttctcttaaataatattttgatgaaaatgtatttggagtggatacaataaaaatgtgttctaaatgg

SEQ ID NO: 595 - protein, 263 aa, Arabidopsis thaliana
  misc_feature (35)..(257): Pfam Name: Abhydrolase_1 Pfam Description: alpha/beta hydrolase fold
  misc_feature: Ceres Clone ID no. 26006
  misc_feature: Bit score of 698.2 for HMM based on sequences of Figure 8
MSEEKRKQHFVLVHGACHGAWCWYKVKPLLEALGHRVTALDLAASGIDTTRSITDISTCEQYSEPLMQLMTSLPNDEKVVLVGHSFGGLSLALAMDKFPDKISVSVFVTAFMPDTKHSPSFVEEKFASSMTPEGWMGSELETYGSDNSGLSVFFSTDFMKHRLYQLSPVEDLELGLLLKRPSSLFINELSKMENFSEKGYGSVPRAYIVCKEDNIISEDHQRWMIHNYPANLVIEMEETDHMPMFCKPQVLSDHLLAIADNFS

SEQ ID NO: 596 - DNA, 1072 bp, Triticum aestivum
  misc_feature: Ceres Clone ID no. 644331
  misc_feature: Encodes the peptide sequence at SEQ ID NO. 597
atcggagccacagctacagctcaagcacagaaaaacagccacaaaaccccacccatgcacatggaggcttgtgcgggccaagctagcagcgcgcacatcgtcctggtgcacggcgcatgcctcggcggctggtcctggttcaaggtggcgacgcggctcaggtcggccgggcaccgcgtcagcacgcctgacctcgcggcgtccggcgtcgaccccaggccgctgcgcgaggtgccgacgttccgcgactacaccaagccgctgctggacctcctggagtccctcccgtccggcgagaaggtggtgctcgtcggccacagcctcggcggcgtgaacgtcgccctcgcctgcgagctgtttccggagaagatcgccgctgcggtgttcgtcgccgccttcatgccggaccacaggtcgccgccgtcgtacgtccttgaaaagttcgtggaggggagaacgctggactggatggacacggagtttaagcctcaagatcctgaggggaagctgcctacttccatgctgttcgggccgctggtcactcgtgcaaagttcttccagttgtgttcgccggaggacctcacgctgggacgatccctgatgagggtcaactccatgttcgtggacgacctgaggctgcagccgccgcacaccgaggcccgctacgggtcggtgcgcaaggcgtacgtcgtcttcaaggacgaccacgccatcgtcgagcagttccagcggtggatggtgcacaactaccccgtggacgaggtgatggaaatcgatggcgcggaccacatggcgttgctctcgacgccgaccgagctggcgcgctgcctcgctgacatcgccgtcaagtatgctgcttgacttcctcgcaaaaaataaaagaaaagtctgctgcttgacgatggtgtggcgcacgttgcttgctgatctatacatctgtctaccttatggtttgtcccgttcgttaggtttcagagacttctactgcactctatttcagaccgataatgtttcaacatcgtatcgtggtgcatgtaactttgctatttaatatttgaagataaatgttggc

SEQ ID NO: 597 - protein, 266 aa, Triticum aestivum
  misc_feature (38)..(259): Pfam Name: Abhydrolase_1 Pfam Description: alpha/beta hydrolase fold
  misc_feature: Ceres Clone ID no. 644331
  misc_feature: Bit score of 483.0 for HMM based on sequences of Figure 8
  misc_feature: Functional Homolog Of SEQ ID NO. 595
MEACAGQASSAHIVLVHGACLGGWSWFKVATRLRSAGHRVSTPDLAASGVDPRPLREVPTFRDYTKPLLDLLESLPSGEKVVLVGHSLGGVNVALACELFPEKIAAAVFVAAFMPDHRSPPSYVLEKFVEGRTLDWMDTEFKPQDPEGKLPTSMLFGPLVTRAKFFQLCSPEDLTLGRSLMRVNSMFVDDLRLQPPHTEARYGSVRKAYVVFKDDHAIVEQFQRWMVHNYPVDEVMEIDGADHMALLSTPTELARCLADIAVKYAA

SEQ ID NO: 598 - protein, 263 aa, Arabidopsis thaliana
  misc_feature (34)..(257): Pfam Name: Abhydrolase_1 Pfam Description: alpha/beta hydrolase fold
  misc_feature: Public GI ID no. 15227859
  misc_feature: Bit score of 482.4 for HMM based on sequences of Figure 8
  misc_feature: Functional Homolog Of SEQ ID NO. 595
MEKNNKKRFVLVHGLCHGAWCWYKVKTHLEAVGHCVTAVDLAASGINMTRLEEIQTLKDYCKPLLELLNSLGSDDDKVILVAHSMGGIPAALASDIFPSKIATIVFLTAFMPDTRNLPAYVYQKLIRSVPQEGWLDTVFGTYGKHECPLEFALFGPKFMAKNLYQLSPVQDLELAKMLVRVNPIITNNLAGTRSFSEEGYGTVTRIYIVCGEDMAVPEDYQWWMIKNFPPKEVMEIKCADHMAMFSKPHKLCALLVEIACKYA

SEQ ID NO: 599 - DNA, 780 bp, Populus balsamifera subsp. trichocarpa
  misc_feature: Ceres Annot ID no. 1504349
  misc_feature: Encodes the peptide sequence at SEQ ID NO. 600
atgggagaggtcaacaatcaaaaaaagcattttgttttgatccatggttcagttgcaggagcttggatatggtacaaggtcaagccaaggctagaggaagctggccaccgagtcacagctcttgacatggctgcatcaggggtgaacacaaaaacaattgaagaagttcgcactttcgatctgtataatgagcccttgatggagttcatggccaaattacctgaaaatgaaaaggttgtattggtggggcacagtttaggtggcttgaatctggcttttgctatggagaaattcccagagaaggtttctcttgctgtttttcttactgcaatcttgcctgataccgtgcaccagccatcttatatgttagaaaagtttgctgaaatcggtcccagggacgaagaatggcaagacactctgttttcattccatggaacccctgaagaaccgcatacatgtgttcatatgggttgcgagtttatgaagtgcaagccctttcatctttcctccgctgagatgctcttaaatagaccaggatcgatgtttgtggaaagcctgtccaaggcaaagaagttcactgatgagagatatggatcagtgccgcgagtttatattgtttgtactgaggatttaatgatgcttgcctcatttcagcgctggatgattgagcaaaatggggtaaaggaagtgatggagattcctgcagatcatatgccagttttttctacgcctacagaactctgccattctatactggagttggcacgcaagcatgcttag

SEQ ID NO: 600 - protein, 259 aa, Populus balsamifera subsp. trichocarpa
  misc_feature (36)..(122): Pfam Name: Abhydrolase_1 Pfam Description: alpha/beta hydrolase fold
  misc_feature: Ceres Annot ID no. 1504349
  misc_feature: Bit score of 517.3 for HMM based on sequences of Figure 8
  misc_feature: Functional Homolog Of SEQ ID NO. 595
MGEVNNQKKHFVLIHGSVAGAWIWYKVKPRLEEAGHRVTALDMAASGVNTKTIEEVRTFDLYNEPLMEFMAKLPENEKVVLVGHSLGGLNLAFAMEKFPEKVSLAVFLTAILPDTVHQPSYMLEKFAEIGPRDEEWQDTLFSFHGTPEEPHTCVHMGCEFMKCKPFHLSSAEMLLNRPGSMFVESLSKAKKFTDERYGSVPRVYIVCTEDLMMLASFQRWMIEQNGVKEVMEIPADHMPVFSTPTELCHSILELARKHA

SEQ ID NO: 601 - DNA, 867 bp, Arabidopsis thaliana
  misc_feature: Ceres Annot ID no. 1265088
  misc_feature: Encodes the peptide sequence at SEQ ID NO. 602
gaagaaaatgagtgaggaggagaggaagcaacacgtcgttctagtacatggtgcttgccatggcgcctggtgctggtacaaggttaagccgcagctcgaggcttctggccaccgcgtaaccgccgtagatctagctgcctccggtatagacatgaccaggtcaatcacagatatatccacatgcgaacaatactcagagccattgatgcagctaatgacctcactaccagatgatgagaaggttgtgcttgttggtcatagcttaggaggtttgagtttagctatggccatggatatgtttccgaccaaaatctctgtttctgtctttgtgactgctatgatgccagacaccaaacactcaccatccttcgtatgggataagctaagaaaagaaacttcacgagaggaatggttagacaccgtgtttacgagcgagaaacctgattttcctagcgagttttggatttttggaccagaattcatggccaagaacttgtatcagttgtctccagtccaagatcttgaattggcgaaaatgttggtgagggcaaacccattgattaagaaagatatggcagagagaagaagcttcagtgaggaaggatacggatccgttacacgtatatttattgtatgcggaaaggatcttgtgtcacccgaagattaccagcgatcgatgatcagcaactttcccccaaaagaagtaatggagatcaaagacgcagatcatatgccaatgttctccaagcctcaacaactatgtgctcttctcttggagattgcaaataaatatgcctaaataaatctgaaatatcatcatcactgcatatcaattacaaattcagtgtccaccacaataataagcca

SEQ ID NO: 602 - protein, 263 aa, Arabidopsis thaliana
  misc_feature (35)..(257): Pfam Name: Abhydrolase_1 Pfam Description: alpha/beta hydrolase fold
  misc_feature: Ceres Annot ID no. 1265088
  misc_feature: Bit score of 556.5 for HMM based on sequences of Figure 8
  misc_feature: Functional Homolog Of SEQ ID NO. 595
MSEEERKQHVVLVHGACHGAWCWYKVKPQLEASGHRVTAVDLAASGIDMTRSITDISTCEQYSEPLMQLMTSLPDDEKVVLVGHSLGGLSLAMAMDMFPTKISVSVFVTAMMPDTKHSPSFVWDKLRKETSREEWLDTVFTSEKPDFPSEFWIFGPEFMAKNLYQLSPVQDLELAKMLVRANPLIKKDMAERRSFSEEGYGSVTRIFIVCGKDLVSPEDYQRSMISNFPPKEVMEIKDADHMPMFSKPQQLCALLLEIANKYA

SEQ ID NO: 603 - protein, 250 aa, Arabidopsis thaliana
  misc_feature (31)..(244): Pfam Name: Abhydrolase_1 Pfam Description: alpha/beta hydrolase fold
  misc_feature: Bit score of 565.8 for HMM based on sequences of Figure 8
  misc_feature: Functional Homolog Of SEQ ID NO. 595
MMKQHFVLVHGSCLGAWCWYKVKPLLEASGHRVTALDLAACGIDTRSITDISTCEQYSEPLIQLMTSLPNDEKVVLVGHSYGGLTLAIAMDKFPDKISVSVFVTSFMPDTKNSPSFVLEKFASTMTPEDWMGSELEPYVVFSAEFTKHRILQLSPIEDLELRLLLKRPGSLFLNDLSRMKNFSEKGYGSVPRAYIVSKDDHTISEEYQRWMIDNYPPNLVIEMEGTDHLPLFCKPQLLSDHLLAIADKFS

SEQ ID NO: 604 - protein, 263 aa, Oryza sativa subsp. indica
  misc_feature (36)..(257): Pfam Name: Abhydrolase_1 Pfam Description: alpha/beta hydrolase fold
  misc_feature: Public GI ID no. 125527987
  misc_feature: Bit score of 481.1 for HMM based on sequences of Figure 8
  misc_feature: Functional Homolog Of SEQ ID NO. 595
MADGKVACKHLVLVHGACIGGWTYFKVATRLRSAGYRVTAPDLGASGVDPRPLREVPTFRDYTAPLLGLLGSLPPGEKVVLVGHSLGGINVALAAELFPDKIAAAVFLCAFMPDHTSRPSHVLEKFIEGKWLDWMDTEFKPQDAEGKLPTSMLFGPQIAQERLMQLCSPEDVTLAGSLLRMSSMFVEDLQKQQPFTEGRYGSVRKVYVVVNQDLAIPEGFQRWMIGNSPVDEVKEIDAADHLVMLSRPDELARCLADIAESYA

SEQ ID NO: 605 - protein, 267 aa, Citrus sinensis
  misc_feature (37)..(261): Pfam Name: Abhydrolase_1 Pfam Description: alpha/beta hydrolase fold
  misc_feature: Public GI ID no. 14279437
  misc_feature: Bit score of 736.8 for HMM based on sequences of Figure 8
  misc_feature: Functional Homolog Of SEQ ID NO. 595
MEEVVGMEEKHFVLVHGVNHGAWCWYKLKARLVAGGHRVTAVDLAASGINMKRIEDVHTFHAYSEPLMEVLASLPAEEKVILVGHSLGGVTLALAGDKFPHKISVAVFVTAFMPDTTHRPSFVLEQYSEKMGKEDDSWLDTQFSQCDASNPSHISMLFGREFLTIKIYQLCPPEDLELAKMLVRPGSMFIDNLSKESKFSDEGYGSVKRVYLVCEEDIGLPKQFQHWMIQNYPVNEVMEIKGGDHMAMLSDPQKLCDCLSQISLKYA

SEQ ID NO: 606 - protein, 262 aa, Brassica napus
  misc_feature (35)..(256): Pfam Name: Abhydrolase_1 Pfam Description: alpha/beta hydrolase fold
  misc_feature: Bit score of 650.2 for HMM based on sequences of Figure 8
  misc_feature: Functional Homolog Of SEQ ID NO. 595
MSENKRKQHFVLVHGSCHGAWCWYKVKPLLEAAGHQVTALNLAASGIDTRSITDISTCEQYSEPLLNLLKSLPDDEKVVLVGHSFGGLSLAIAMDKFPDKISVSVFLSAFMPDTKHSPSFVLEKFGSSMAHEAWMGTEFKPYGSDNSGLSMFFSFEFMKLGLYQLSPVEDLELGLLLKRPGSLFVSNLSKMKNFSDEGYGNVPRAYIVCKEDKGIPEAFQRWLIDNFPVNIVMEIDETDHMPMFCKPQQLCDHFMEIADKFV

SEQ ID NO: 607 - DNA, 953 bp, Brassica napus
  misc_feature: Ceres Clone ID no. 1065042
  misc_feature: Encodes the peptide sequence at SEQ ID NO. 608
aggaaataatatacaaaatcaaaggttaagaaaaaaaatgggtgaggagaagaatcagcagcacttcgtgctagtacatggtgcatgccacggcgcgtggtgctggaacaaggttaagccgcttctcgaggcctccggccaccgcgtaaccgccttagacctagctgcttcgggtatagacacaaccaggtctatcactgagatctccacatgcgaacaatactctgagccattgatacagctaatcgcctcattaccaagtgatgagaaggttgtgctcgttggtcatagctttggagggttcagcttagccatggccatggataagtttccagacaaaatctctgtctcagtcttcgtgactgctttcatgcccgataccaaacactcaccatcgttcgtcgtggataagtttaaacgggatacgccaccagaagcatggttgggctcggagttcaaatcatatggctcagacaattccggtgtgtcaatgtctttcagcactgagttcatgaagcacgctctctatcaactttctcctgttgaggatattgagcttggattgcttttaaagaggcccggatcattgttcatcaacgatttatccaaggtggagaacttttcggacaaagggtatggatctgttcctcgagcttacattgtgtgcaaagaggacaaaacaattacaaaagaaattcagtggtggatgatcgataattatccgacgaaagtagtgaaggagatggaggacacagatcatatgccaatgttctgcaagcctcagttactaagtgactatctcttggaaatcgcggaaaaattagcttaaattatcttgttatgaaaatgtatttggatacaaataagtgttgtcctgcaaatgggtctttctaaagatcaagacttttatcgcgttcaaatgtttgacataatttaaaataaacttaacagtc

SEQ ID NO: 608 - protein, 263 aa, Brassica napus
  misc_feature (35)..(257): Pfam Name: Abhydrolase_1 Pfam Description: alpha/beta hydrolase fold
  misc_feature: Ceres Clone ID no. 1065042
  misc_feature: Bit score of 641.8 for HMM based on sequences of Figure 8
  misc_feature: Functional Homolog Of SEQ ID NO. 595
MGEEKNQQHFVLVHGACHGAWCWNKVKPLLEASGHRVTALDLAASGIDTTRSITEISTCEQYSEPLIQLIASLPSDEKVVLVGHSFGGFSLAMAMDKFPDKISVSVFVTAFMPDTKHSPSFVVDKFKRDTPPEAWLGSEFKSYGSDNSGVSMSFSTEFMKHALYQLSPVEDIELGLLLKRPGSLFINDLSKVENFSDKGYGSVPRAYIVCKEDKTITKEIQWWMIDNYPTKVVKEMEDTDHMPMFCKPQLLSDYLLEIAEKLA

SEQ ID NO: 609 - protein, 265 aa, Vitis vinifera
  misc_feature (36)..(259): Pfam Name: Abhydrolase_1 Pfam Description: alpha/beta hydrolase fold
  misc_feature: Public GI ID no. 157329790
  misc_feature: Bit score of 751.6 for HMM based on sequences of Figure 8
  misc_feature: Functional Homolog Of SEQ ID NO. 595
MEVDRKQGRHFVLVHGACHGAWTWYKVKPRLEAAGHRVTALDMAASGINRKQIQEVHSMHEYSQPLLEMMAALPPNEKVILVGHSLGGLNLAVAMEKFPEKVSVAVFLTAFMPDTLHRPSYVLDQYVERTPNDAWLDTQFSPYGSSEKPQNSMFFGPEFISTKLYQLSPIEDLELVLALARPASLFLEDLAELKKFSNEGYGSVTSVFIRCDKDEGIRKEFQQWMIENSGGVKEVMNIKDADHMAMFSKPEELCACLLEVAHKYG

SEQ ID NO: 610 - protein, 272 aa, Arabidopsis thaliana
  misc_feature (53)..(266): Pfam Name: Abhydrolase_1 Pfam Description: alpha/beta hydrolase fold
  misc_feature: Public GI ID no. 15227861
  misc_feature: Bit score of 566.2 for HMM based on sequences of Figure 8
  misc_feature: Functional Homolog Of SEQ ID NO. 595
MYENGISFIISLLICGCVKSEEMMKQHFVLVHGSCLGAWCWYKVKPLLEASGHRVTALDLAACGIDTRSITDISTCEQYSEPLIQLMTSLPNDEKVVLVGHSYGGLTLAIAMDKFPDKISVSVFVTSFMPDTKNSPSFVLEKFASTMTPEDWMGSELEPYVVFSAEFTKHRILQLSPIEDLELRLLLKRPGSLFLNDLSRMKNFSEKGYGSVPRAYIVSKDDHTISEEYQRWMIDNYPPNLVIEMEGTDHLPLFCKPQLLSDHLLAIADKFS

SEQ ID NO: 611 - protein, 259 aa, Gentiana triflora var. japonica
  misc_feature (32)..(253): Pfam Name: Abhydrolase_1 Pfam Description: alpha/beta hydrolase fold
  misc_feature: Public GI ID no. 146272407
  misc_feature: Bit score of 686.5 for HMM based on sequences of Figure 8
  misc_feature: Functional Homolog Of SEQ ID NO. 595
MSPTKHFVAVHGVGHGAWVYYKLKPRIEAAGFKFTAIDLAAAGVNPKKLEEVNSLEEYCGPLFDVLAAVPEGEKVILVGHSGGGLSAAVGMEKFPKKISVAVFLNAIMPDTKNRPSYVMEEYTARTPIEAWKDTQFSAYGEPPITALLCGPEFISTSLYHLSPVEDHTLGKLLVRPGALFVEDLLKGAVKFTDEGFGSVPRVYVVATEDKTIPPEFQRWMIENNPVAEVKEIEGADHLPQFSKPDELTQVLVDIAKNHG

SEQ ID NO: 612 - DNA, 909 bp, Arabidopsis thaliana
  misc_feature: Ceres Clone ID no. 95094
  misc_feature: Encodes the peptide sequence at SEQ ID NO. 613
aactttataacgctattctcaaacaagcaaagaaccttaaccaaaaagaaaacgtctacggagacatatggagaggaaacatcacttcgtgttagttcacaacgcttatcatggagcctggatctggtacaagctcaagcccctccttgaatcagccggccaccgcgttactgctgtcgaactcgccgcctccgggatcgacccacgaccaatccaggccgttgaaaccgtcgacgaatactccaaaccgttgatcgaaaccctcaaatctcttccagagaacgaagaggtaattctggttggattcagcttcggaggcatcaacatcgctctcgccgccgacatatttccggcgaagattaaggttcttgtgttcctcaacgccttcttgcccgacacaacccacgtgccttctcacgttctggacaagtatatggagatgcctggaggtttgggagattgtgagttttcatctcatgaaacaagaaatgggacgatgagtttattgaagatgggaccaaaattcatgaaggcacgtctttaccaaaattgtcccatagaggattacgagctggcaaaaatgttgcataggcaagggtcatttttcacagaggatctatcaaagaaagaaaagtttagcgaggaaggatatggttcggtgcaacgagtttacgtaatgagtagtgaagacaaagccatcccctgcgatttcattcgttggatgattgataatttcaacgtctcgaaagtctacgagatcgatggcggagatcacatggtgatgctctccaaaccccaaaaactctttgactctctctctgctattgccaccgattatatgtaataatcttaaagtctgttttacttttttctcatcgttactaataaaacaaacccctttttccgggc

SEQ ID NO: 613 - protein, 258 aa, Arabidopsis thaliana
  misc_feature (32)..(252): Pfam Name: Abhydrolase_1 Pfam Description: alpha/beta hydrolase fold
  misc_feature: Ceres Clone ID no. 95094
  misc_feature: Bit score of 495.0 for HMM based on sequences of Figure 8
  misc_feature: Functional Homolog Of SEQ ID NO. 595
MERKHHFVLVHNAYHGAWIWYKLKPLLESAGHRVTAVELAASGIDPRPIQAVETVDEYSKPLIETLKSLPENEEVILVGFSFGGINIALAADIFPAKIKVLVFLNAFLPDTTHVPSHVLDKYMEMPGGLGDCEFSSHETRNGTMSLLKMGPKFMKARLYQNCPIEDYELAKMLHRQGSFFTEDLSKKEKFSEEGYGSVQRVYVMSSEDKAIPCDFIRWMIDNFNVSKVYEIDGGDHMVMLSKPQKLFDSLSAIATDYM

SEQ ID NO: 614 - DNA, 985 bp, Musa acuminata
  misc_feature: Ceres Clone ID no. 1714893
  misc_feature: Encodes the peptide sequence at SEQ ID NO. 615
acttgccatagcacctccaaatgaattatggagaaggaaggggcgacgggagctgcaacaagaagcacataattctcgtccatggcgcttgccatggagcatggtcttggcacaaggtgacgacccagttgaggtccgctgggtaccaggttacggtgcccgacctcgcggcctccggcgtcgacgagcggcggttccaggacctgcgatcgttcatccactactcccagccgctcctggacatattggcctgcctccctcctggtgagagggtcattctggtaggccacagcctcggaggcctcaacatagctttggctatggacaggttccctgagaagatcgccgccgccgtcttcgtcaccgccttgatgccggattcagtcaacccgccctcctacgtcatggacaagcttaaaaaggaaaaaaccatgttattttggagcgacacacaatttggcttggtcggggacgaagataaaggtcccgtttccctgctattcggccccaaatttttatccaagctttacacgcgtagcccacccgaggatctgacgctggcgaggaccctcatgaggccttcttccttcttccttgaagacctcgggtccatgcctcccttctccgagtcgggttacggatcggtggagaagatctacgtcgtgtgcgctcaggatgagatcctcacggaaggttttcagcgctggatgatcgagaacaacccagtgaaagaggtgagagagctggaggacgctgaccatatgcccatgttctcaaccccgaagcagctgtttcagtgcctctcggatgttgccgatgcctgtgcttgatcctcccgggttttactattacaagccaccaaatactgtggccatagtaaataagatagttgttcgtgcgttgctgctgtgatcgatgcatcatggtttgctatcagcaacggtgtatttgtttcagttatcaaatcatggacagctgagaagac

SEQ ID NO: 615 - protein, 269 aa, Musa acuminata
  misc_feature (42)..(263): Pfam Name: Abhydrolase_1 Pfam Description: alpha/beta hydrolase fold
  misc_feature: Ceres Clone ID no. 1714893
  misc_feature: Bit score of 688.3 for HMM based on sequences of Figure 8
  misc_feature: Functional Homolog Of SEQ ID NO. 595
MNYGEGRGDGSCNKKHIILVHGACHGAWSWHKVTTQLRSAGYQVTVPDLAASGVDERRFQDLRSFIHYSQPLLDILACLPPGERVILVGHSLGGLNIALAMDRFPEKIAAAVFVTALMPDSVNPPSYVMDKLKKEKTMLFWSDTQFGLVGDEDKGPVSLLFGPKFLSKLYTRSPPEDLTLARTLMRPSSFFLEDLGSMPPFSESGYGSVEKIYVVCAQDEILTEGFQRWMIENNPVKEVRELEDADHMPMFSTPKQLFQCLSDVADACA

SEQ ID NO: 616 - protein, 265 aa, Vitis vinifera
  misc_feature (36)..(259): Pfam Name: Abhydrolase_1 Pfam Description: alpha/beta hydrolase fold
  misc_feature: Public GI ID no. 157329890
  misc_feature: Bit score of 755.1 for HMM based on sequences of Figure 8
  misc_feature: Functional Homolog Of SEQ ID NO. 595
MEVDRKQGRHFVLVHGACHGAWSWYKVKPRLEAAGHRVTALDMAASGINRKQIQEVHSMHEYSQPLLEMMATLPPNEKVILVGHSLGGLNLAVAMEKFPEKVSVAVFLTAFMPDTLHRPSYVLDQYVERTPNDAWLDTQFSPYGSSEKPQNSMFFGPEFISTKLYQLSPIEDLELVLALARPASLFLEDLAELKKFSNEGYGSVTSVFIRCDKDEAIRKEFQQWMIENSGGVKEVMNIKDADHMAMFSKPEELCACLLEVAHKYG

SEQ ID NO: 617 - DNA, 913 bp, Arabidopsis thaliana
  misc_feature: Ceres Annot ID no. 859635
  misc_feature: Encodes the peptide sequence at SEQ ID NO. 618
gtgtgacttttaggagagtaagaaaatatcgaaggtcagaagaatgagtgaggaaaagaggaaacaacattttgtactagtacatggttcgtgccatggcgcgtggtgctggtacaaggttaagccgctgctagaggcggtgggccaccgcgtaactgctgtggacttagctgcctccggaatagacacaacgaggtcgatcactgacatccccacatgcgaacaatactcggagccattgacgaagctcctgacctcattgccaaatgatgaaaaggttgtgctcgttggtcacagctttggtggcttgaacttagccatagccatggaaaagtttcccgaaaaaatctctgtcgctgtattcttgactgctttcatgccggacaccgaacactcaccatccttcgtcttggacaagtttggaagcaacatgcctcaagaagcatggatgggcaccgaattcgaaccttatggttcagacaattccggactgagtatgttttttagccctgacttcatgaagttgggtctctaccagctttctccagttgaggatcttgaactgggattacttttaatgaggccaggatcgttatttattaacgatttatcgaagatgaaaaacttctcggatgaaggatatgggtctgttcctcgagttttcatagtgtgtaaagaggacaaagcaattccagaagaacgccagagatggatgattgataattttccggtgaatttagtgatggagatggaggagacagatcatatgccaatgttctgcaagcctcagcaactcagtgattacttcctgaaaatcgcggacaaattcgtttaatcaaatcttcatgaaactgtattggatttgatataataaaggtttgttgcaaatgaattaataatgatgaatattttt

SEQ ID NO: 618 - protein, 263 aa, Arabidopsis thaliana
  misc_feature (35)..(257): Pfam Name: Abhydrolase_1 Pfam Description: alpha/beta hydrolase fold
  misc_feature: Ceres Annot ID no. 859635
  misc_feature: Bit score of 673.2 for HMM based on sequences of Figure 8
  misc_feature: Functional Homolog Of SEQ ID NO. 595
MSEEKRKQHFVLVHGSCHGAWCWYKVKPLLEAVGHRVTAVDLAASGIDTTRSITDIPTCEQYSEPLTKLLTSLPNDEKVVLVGHSFGGLNLAIAMEKFPEKISVAVFLTAFMPDTEHSPSFVLDKFGSNMPQEAWMGTEFEPYGSDNSGLSMFFSPDFMKLGLYQLSPVEDLELGLLLMRPGSLFINDLSKMKNFSDEGYGSVPRVFIVCKEDKAIPEERQRWMIDNFPVNLVMEMEETDHMPMFCKPQQLSDYFLKIADKFV

SEQ ID NO: 619 - protein, 263 aa, Oryza sativa subsp. japonica
  misc_feature (36)..(257): Pfam Name: Abhydrolase_1 Pfam Description: alpha/beta hydrolase fold
  misc_feature: Public GI ID no. 115440397
  misc_feature: Bit score of 481.7 for HMM based on sequences of Figure 8
  misc_feature: Functional Homolog Of SEQ ID NO. 595
MADGKVACKHLVLVHGACIGGWTYFKVATRLRSAGYRVTAPDLGASGVDPRPLREVPTFRDYTAPLLGLLGSLPPGEKVVLVGHSLGGINVALAAELFPDKIAAAVFLCAFMPDHTSRPSHVLEKFIEGKWLDWMDTEFKPQDAEGKLPTSMLFGPQIAQERLMQLCSPEDVTLAGSLLRVSSMFVEDLQKQQPFTEGRYGSVRKVYVVVNQDLAIPEGFQRWMIGNSPVDEVKEIDAADHLVMLSRPDELARCLADIAESYA

SEQ ID NO: 620 - protein, 260 aa, Nicotiana tabacum
  misc_feature (32)..(254): Pfam Name: Abhydrolase_1 Pfam Description: alpha/beta hydrolase fold
  misc_feature: Public GI ID no. 40549303
  misc_feature: Bit score of 747.1 for HMM based on sequences of Figure 8
  misc_feature: Functional Homolog Of SEQ ID NO. 595
MKEGKHFVLVHGACHGGWSWYKLKPLLEAAGHKVTALDLAASGTDLRKIEELRTLYDYTLPLMELMESLSADEKVILVGHSLGGMNLGLAMEKYPQKIYAAVFLAAFMPDSVHNSSFVLEQYNERTPAENWLDTQFLPYGSPEEPLTSMFFGPKFLAHKLYQLCSPEDLALASSLVRPSSLFMEDLSKAKYFTDERFGSVKRVYIVCTEDKGIPEEFQRWQIDNIGVTEAIEIKGADHMAMLCEPQKLCASLLEIAHKYN

SEQ ID NO: 621 - DNA, 792 bp, Populus balsamifera subsp. trichocarpa
  misc_feature: Ceres Annot ID no. 1457048
  misc_feature: Encodes the peptide sequence at SEQ ID NO. 622
atggtagagaccaagaatcagaagcattttgttctagtacatggagcttgccatggggcttggtgctggcaaaagttcaaaacgctgcttgagtcagcaagtaacagggtcacggtgcttgaccttgctgcttcaggcgccaacatgaaggcaatccaagatgtagaaacacttgatgaatatacggagcctttgttagagtttctggcctcattacaaccgaaggagaaggtcattctagtagggcacagcctaggaggtttgagtttggctcttgctatggaaaagttcccagagaagattgctgttgctgttttcttatcagctttcatgccagataccacacacaagccatcatttgtcttggatcagtataacgagaggaccccggcggattcctggttggacactcaatttttaccatacagcagttctcaaagtcatctcacaacaatgtcttttggacccaaattcttatcctccaagctctatcagctaagcccacctgaggatcttgagcaagcaaagactatggtaaggccaggatcactgtttctgtatgatttgtcaaaggcaaacagtttctccacgacgggctatgggtcagtcaaacgagtgtatgttatctgcgatgaagatttagcgataccagaagagtttcaacgctggatgattgaaaacagtgctgttgaagaagttatggaaattgaaggtgcagaccatatggttatgttcagcaagccacaagaactcttccattgtctctcagagatagcaaataaacatgcttaa

SEQ ID NO: 622 - protein, 263 aa, Populus balsamifera subsp. trichocarpa
  misc_feature (35)..(257): Pfam Name: Abhydrolase_1 Pfam Description: alpha/beta hydrolase fold
  misc_feature: Ceres Annot ID no. 1457048
  misc_feature: Bit score of 751.8 for HMM based on sequences of Figure 8
  misc_feature: Functional Homolog Of SEQ ID NO. 595
MVETKNQKHFVLVHGACHGAWCWQKFKTLLESASNRVTVLDLAASGANMKAIQDVETLDEYTEPLLEFLASLQPKEKVILVGHSLGGLSLALAMEKFPEKIAVAVFLSAFMPDTTHKPSFVLDQYNERTPADSWLDTQFLPYSSSQSHLTTMSFGPKFLSSKLYQLSPPEDLEQAKTMVRPGSLFLYDLSKANSFSTTGYGSVKRVYVICDEDLAIPEEFQRWMIENSAVEEVMEIEGADHMVMFSKPQELFHCLSEIANKHA

SEQ ID NO: 623 - protein, 264 aa, Rauvolfia serpentina
  misc_feature (38)..(260): Pfam Name: Abhydrolase_1 Pfam Description: alpha/beta hydrolase fold
  misc_feature: Public GI ID no. 50401192
  misc_feature: Bit score of 698.1 for HMM based on sequences of Figure 8
  misc_feature: Functional Homolog Of SEQ ID NO. 595
MHSAANAKQQKHFVLVHGGCLGAWIWYKLKPLLESAGHKVTAVDLSAAGINPRRLDEIHTFRDYSEPLMEVMASIPPDEKVVLLGHSFGGMSLGLAMETYPEKISVAVFMSAMMPDPNHSLTYPFEKYNEKCPADMMLDSQFSTYGNPENPGMSMILGPQFMALKMFQNCSVEDLELAKMLTRPGSLFFQDLAKAKKFSTERYGSVKRAYIFCNEDKSFPVEFQKWFVESVGADKVKEIKEADHMGMLSQPREVCKCLLDISDS

SEQ ID NO: 624 - DNA, 795 bp, Populus balsamifera subsp. trichocarpa
  misc_feature: Ceres Annot ID no. 1451281
  misc_feature: Encodes the peptide sequence at SEQ ID NO. 625
atgggagaggtcaacaatcaaaaacagcattttgttttgatccatggttcagttgcaggagcttggatatggtacaaggtcaagccaaggctagaggaagctggccaccgtgtcacagctcttgacatggctgcatcaggggtgaacacacaaaaaattgaagaagttcgcacttttgatcagtataatgagcccttgatggagttcatggccaaattacctgaaaatgaaaaggttgtattggtggggcacagtttaggtggcttgaatctggcttttgctatggagaaattcccagagaaggtttctcttgctgtttttcttactgcaatcttgcctgatacggtgcaccagccatcttatatgttagaaaagtttgctgaaatcggtcccaagggagaagagtggcaagacactctgttttcattccatggaacccctgaagaaccgcatacatgtgttcacatgggatgcgagtttatgaagtgcaagccctttcatctttcctccgctgaggatctagctctgcagatgctcttaaatagaccaggatcgatgtttgtggaaagcctgtccaaggcaaagaagttcactgatgagagatatggatcagtgccgcgagtttatattgtttgtactgaggatttaatgatgcctgcctcatttcagcgctggatgattgagcaaaatggggtaaaggaagtgatggagattcctgcagatcatatgccagttttttctacgcctacagaactctgccattctatactggagttggcacgcaagcatgcttag

SEQ ID NO: 625 - protein, 264 aa, Populus balsamifera subsp. trichocarpa
  misc_feature (36)..(258): Pfam Name: Abhydrolase_1 Pfam Description: alpha/beta hydrolase fold
  misc_feature: Ceres Annot ID no. 1451281
  misc_feature: Bit score of 547.1 for HMM based on sequences of Figure 8
  misc_feature: Functional Homolog Of SEQ ID NO. 595
MGEVNNQKQHFVLIHGSVAGAWIWYKVKPRLEEAGHRVTALDMAASGVNTQKIEEVRTFDQYNEPLMEFMAKLPENEKVVLVGHSLGGLNLAFAMEKFPEKVSLAVFLTAILPDTVHQPSYMLEKFAEIGPKGEEWQDTLFSFHGTPEEPHTCVHMGCEFMKCKPFHLSSAEDLALQMLLNRPGSMFVESLSKAKKFTDERYGSVPRVYIVCTEDLMMPASFQRWMIEQNGVKEVMEIPADHMPVFSTPTELCHSILELARKHA

SEQ ID NO: 626 - DNA, 792 bp, Populus balsamifera subsp. trichocarpa
  misc_feature: Ceres Annot ID no. 1510252
  misc_feature: Encodes the peptide sequence at SEQ ID NO. 627
atggtagagaccaagaatcaggagcattttgttctagtacatggagcttgccatggggcttggtgctggcaaaagttcaaaacgctgcttgagtcagcaagtaacagggtcacggtgcttgaccttgctgcttcaggcgccaacatgaaggcaatccaagatgtagaaacacttgatgaatatacggagcctttgttagagtttctggcctcattacaaccgaaggagaaggtcattctagtagggcacagcctaggaggtttgagtttggctcttgctatggaaaagttcccagagaagattgctgttgctgttttcttatcagctttcatgccagataccacacacaagccatcatttgtcttggatcagtataacgagaggaccccggcggattcctggttggacactcaatttttaccatacagcagttctcaaagtcatctcacaacaatgtcttttggacccaaattcttatcctccaagctctatcagctaagcccacctgaggatcttgagcaagcaaaaactttggtaaggccaggatcaatgtttctggatgatttgtcaaaggcaaacagtttctccacgacgggctatgggtcagtcaaacgagtatatgttatctttgacaaagatttagcgataccagtagagtttcaacgctggatgattgaaaacagtgctgttgaagaagttatggaaattgaaggtgcagaccatatggttatgttcagcaagccacaagaactcttccattgtctctcagagatagcaaataaacatgcttaa

SEQ ID NO: 627 - protein, 263 aa, Populus balsamifera subsp. trichocarpa
  misc_feature (35)..(257): Pfam Name: Abhydrolase_1 Pfam Description: alpha/beta hydrolase fold
  misc_feature: Ceres Annot ID no. 1510252
  misc_feature: Bit score of 731.8 for HMM based on sequences of Figure 8
  misc_feature: Functional Homolog Of SEQ ID NO. 595
MVETKNQEHFVLVHGACHGAWCWQKFKTLLESASNRVTVLDLAASGANMKAIQDVETLDEYTEPLLEFLASLQPKEKVILVGHSLGGLSLALAMEKFPEKIAVAVFLSAFMPDTTHKPSFVLDQYNERTPADSWLDTQFLPYSSSQSHLTTMSFGPKFLSSKLYQLSPPEDLEQAKTLVRPGSMFLDDLSKANSFSTTGYGSVKRVYVIFDKDLAIPVEFQRWMIENSAVEEVMEIEGADHMVMFSKPQELFHCLSEIANKHA

SEQ ID NO: 628 - DNA, 1062 bp, Panicum virgatum
  misc_feature: Ceres Clone ID no. 1822691
  misc_feature: Encodes the peptide sequence at SEQ ID NO. 629
gcgccgagacgtggctgcaggcgcacgagaggtgatcgagcattcgagccgacgcgcgcgcagcaagcagcaccgtacccgagtttctcgccatgggcggcagcaagcacatcgtgctcgtccacggcgcgtgcctcggcggctggtcctggttcaaggtggccacccggctccgcgccgcggggtaccgcgtggacgcgccggacctggcggcgtcgggcgtggacccgcggccgctccgcgaggtgcccacgttccgggactacacggcgccgctgctggacctcctcgcggcgctcccggccggggaccgcgtggtgctcgtcggccacagcctcggcggcctgagcgtcgccctggccgccgagctgttcccggacaaggtcgccgccgccgtgttcctctgcgccttcatgcccgactgcgccgcgcggccgtcgcacgtgctcgagaagttcgtggaggggaagtggctggactggatggacacggagatgaagccgcaggacgcggagggcaagctccccacgtccatgatgttcgggccccggatcctgcgggagaagttctaccagctctgctcgcccgaggacatcaccctggcgtcgtccctgatgcgggtgagctcgatgttcgtggaggacctggccgcccagcagccgttcaccgcgggcgggtacggctcggtgcgcagggtgtacgtggtgtgctcggaggactacggcatcgtggaggggttccagagctggatggtggagaacaacccggtggaggaggtgagggagatcgccgccgaccacctggtgatgctctccaggcccgacgagctggcgcggtgcctcgccgacatcgccgacaagtacgcgtgatgaatgatgatgatgaggaagatcgatgctcgatagatctgccgctgcgtggatgcatggtgttctgttgtgatcagctttcttttctttcttaatcaaaaaagaaaccttggagaactcgagcctgttgtttcgaaatgagattgaagttcacggtgtggcgagcaattgaccaatcgtggatgtttattag

SEQ ID NO: 629 - protein, 258 aa, Panicum virgatum
  misc_feature (32)..(252): Pfam Name: Abhydrolase_1 Pfam Description: alpha/beta hydrolase fold
  misc_feature: Ceres Clone ID no. 1822691
  misc_feature: Bit score of 489.6 for HMM based on sequences of Figure 8
  misc_feature: Functional Homolog Of SEQ ID NO. 595
MGGSKHIVLVHGACLGGWSWFKVATRLRAAGYRVDAPDLAASGVDPRPLREVPTFRDYTAPLLDLLAALPAGDRVVLVGHSLGGLSVALAAELFPDKVAAAVFLCAFMPDCAARPSHVLEKFVEGKWLDWMDTEMKPQDAEGKLPTSMMFGPRILREKFYQLCSPEDITLASSLMRVSSMFVEDLAAQQPFTAGGYGSVRRVYVVCSEDYGIVEGFQSWMVENNPVEEVREIAADHLVMLSRPDELARCLADIADKYA

SEQ ID NO: 630 - protein, 259 aa, Rheum australe
  misc_feature (31)..(253): Pfam Name: Abhydrolase_1 Pfam Description: alpha/beta hydrolase fold
  misc_feature: Public GI ID no. 197312921
  misc_feature: Bit score of 688.8 for HMM based on sequences of Figure 8
  misc_feature: Functional Homolog Of SEQ ID NO. 595
MQSKHYMVVHGMSHGAWCWYKLKPLLESAGHRVTALDMGASGVNMRPVEELRSFRDYNAPLLSFMSSLPEDDKVVLVGHSLGGINIAFAMEEFPEKVSAAVFVAALVPDTVNKPSFFLDELFKKIGAANGWLDCQFSTFGSPDEPVTVISFGPKFLSLLYDSSPIEDYELAKMLTRPLPNYVTDLGKAEKLSDGKYGSVRRVYVICKEDKAIPDELVGQMIEWNGLKEVIELQGADHMPMLSNPQQLCDCLVQIAVENP

SEQ ID NO: 631 - DNA, 795 bp, Solanum lycopersicum
  misc_feature: Ceres Annot ID no. 8456439
  misc_feature: Encodes the peptide sequence at SEQ ID NO. 632
atggaagctaacaagaaacaaggaaaacattttgttctagtacatggtgcaggccatggagcttggtgttggtacaagctaaaaccattgctagaggctgcaggccacaaggtcactgctcttgacttagcagcctctggcattgatttgagaaaaatagagcaacttcacacacttcatgattacactttgccattattggaattaatggaatctcttccacaagaggagaaagccatattagttggacatagtcttggtggtatgaatttagcacttgctatggaaaaatacccaaaaaagatctatgctgctgttttcttggctgcttttatgcctgattctattcacatatcttcctatgttatggatcagtacaatgaacggacaccagcagagaattggttagatactcaatttttaccatatggtacccctgaagagccactcacatccatgacttttggtcccaaatttttggctgataagctttaccggttaagccctcctgaggatgttgcattaggattatcattagtgagaacaagttctctgtttctggaagatttgtcaaaggccaagtatttgacagatgaaggatatggatctgtgaagagagtttatgtagtgtgtacagaggataaaggcatatcaaaagaatttcaacaatggcaaattgataatattggtgttactgaagcaaaggaaattaaaggtgctgatcatatggcaatgctatgtatgcccaaaaaactttgtgacactctcgtggagattgcagataaatacaattga

SEQ ID NO: 632 - protein, 264 aa, Solanum lycopersicum
  misc_feature (36)..(258): Pfam Name: Abhydrolase_1 Pfam Description: alpha/beta hydrolase fold
  misc_feature: Ceres Annot ID no. 8456439
  misc_feature: Bit score of 748.2 for HMM based on sequences of Figure 8
  misc_feature: Functional Homolog Of SEQ ID NO. 595
MEANKKQGKHFVLVHGAGHGAWCWYKLKPLLEAAGHKVTALDLAASGIDLRKIEQLHTLHDYTLPLLELMESLPQEEKAILVGHSLGGMNLALAMEKYPKKIYAAVFLAAFMPDSIHISSYVMDQYNERTPAENWLDTQFLPYGTPEEPLTSMTFGPKFLADKLYRLSPPEDVALGLSLVRTSSLFLEDLSKAKYLTDEGYGSVKRVYVVCTEDKGISKEFQQWQIDNIGVTEAKEIKGADHMAMLCMPKKLCDTLVEIADKYN

SEQ ID NO: 633 - protein, 260 aa, Brassica rapa
  misc_feature (35)..(257): Pfam Name: Abhydrolase_1 Pfam Description: alpha/beta hydrolase fold
  misc_feature: Bit score of 632.2 for HMM based on sequences of Figure 8
  misc_feature: Functional Homolog Of SEQ ID NO. 595
MGEEKKQQHFVLVHGACHGAWCWYKVKPLLEASGHRVTALDLAASGIDTTRSITEISTCEQYSEPLIQLIASLPSDEKVVLVGHSFGGFSLTMAMDKFPDKISVSVFVTAFMPDTKHSPSFVVDKFKRETPPEAWLGSELKPYGSDNSGVSMSFSTEFMKHALYQLSPVEDIELGLLLKRPGSLFINDLSKVENFSDKGYGSVPRAYIVCKEDKTLTKEIQWWMIDNFPTKLVKEMEDTDHMPMFCKPQLLSDYLSEIAE

SEQ ID NO: 634 - protein, 258 aa, Arabidopsis thaliana
  misc_feature (32)..(252): Pfam Name: Abhydrolase_1 Pfam Description: alpha/beta hydrolase fold
  misc_feature: Public GI ID no. 15028131
  misc_feature: Bit score of 489.9 for HMM based on sequences of Figure 8
  misc_feature: Functional Homolog Of SEQ ID NO. 595
MERKHHFVLVHNAYHGAWIWYKLKPLLESAGHRVTAVELAASGIDPRPIQAVETVDEYSKPLIETLKSLPENEEVILVGFSFGGINIALAADIFPAKIKVLVFLNAFLPDTTHVPSHVLDKYMEMPGGLGDCEFSSHETRNGTMSLLKMGPKFMKARLYQNCPIEDYELAKMLHRQRSFFTEDLSKKEKFSEEGYGSVQRVYVMSSEDKAIPCDFIRWMIDNFNVSKVYEIDGGDHMVMLSKPQKLFDSLSAIATDYM

SEQ ID NO: 635 - DNA, 875 bp, Arabidopsis thaliana
  misc_feature: Ceres Clone ID no. 270875
  misc_feature: Encodes the peptide sequence at SEQ ID NO. 636
acatcacataccaaaaaaaggcaaaacactcacgaaagaagaaacggagaggatgaagcattatgtgctagttcacggaggctgccacggtgcgtggtgttggtacaaggtgaagccgatgcttgaacattccggccaccgtgtcacggtttttgatcttacggcgcatggtgtgaacatgagcagagtagaagatattcagactttggaggatttcgctaagccgttgcttgaggttcttgagtcttttggctcggatgataaagtagtcctcgtcgcgcatagcctcggtggaataccggctgctcttgcagccgacatgtttcctagtaaaatctctgttgctgtcttcgttacttcttttatgcccgacacaacgaatccaccttcttacgtgttcgaaaagtttctcggaagcattacagaagaagaacgtatggacttcgagttagggagctatggaacagatgaccatccactaaagactgcttttcttggacctaactacttgaagaatatgtatctactttctcctatcgaagattatgaattggccaaaatgttgatgagagtcacaccggctattactagtaatctgacggggactaaaagcttaacggcacaaggatatggatcgattagtcgtgtgtatatcgtatgcggagaagataaaggtatacgtgtagatttccaacgatggatgattgagaactctccggttaaagaagtgatggagatcaaagatgcagatcatatgcctatgttttccaagcctcatgaactctgtgatcgtcttctaaagattgctgataaatatccctaagcaagaatatctatgacaatatcaataattttcatgggaataagtttttttg

SEQ ID NO: 636 - protein, 256 aa, Arabidopsis thaliana
  misc_feature (29)..(250): Pfam Name: Abhydrolase_1 Pfam Description: alpha/beta hydrolase fold
  misc_feature: Ceres Clone ID no. 270875
  misc_feature: Bit score of 486.5 for HMM based on sequences of Figure 8
  misc_feature: Functional Homolog Of SEQ ID NO. 595
MKHYVLVHGGCHGAWCWYKVKPMLEHSGHRVTVFDLTAHGVNMSRVEDIQTLEDFAKPLLEVLESFGSDDKVVLVAHSLGGIPAALAADMFPSKISVAVFVTSFMPDTTNPPSYVFEKFLGSITEEERMDFELGSYGTDDHPLKTAFLGPNYLKNMYLLSPIEDYELAKMLMRVTPAITSNLTGTKSLTAQGYGSISRVYIVCGEDKGIRVDFQRWMIENSPVKEVMEIKDADHMPMFSKPHELCDRLLKIADKYP

SEQ ID NO: 637 - protein, 263 aa, Arabidopsis thaliana
  misc_feature (35)..(257): Pfam Name: Abhydrolase_1 Pfam Description: alpha/beta hydrolase fold
  misc_feature: Public GI ID no. 27754457
  misc_feature: Bit score of 671.9 for HMM based on sequences of Figure 8
  misc_feature: Functional Homolog Of SEQ ID NO. 595
MSEEKRKQHFVLVHGSCHGAWCWYKVKPLLEAVGHRVTAVDLAASGIDTTRSITDIPTCEQYSEPLTKLLTSLPNDEKVVLVGHSFGGLNLAIAMEKFPKKISVAVFLTAFMPDTEHSPSFVLDKFGSNMPQEAWMGTEFEPYGSDNSGLSMFFSPDFMKLGLYQLSPVEDLELGLLLMRPGSLFINDLSKMKNFSDEGYGSVPRVFIVCKEDKAIPEERQRWMIDNFPVNLVMEMEETDHMPMFCKPQQLSDYFLKIADKFV

SEQ ID NO: 638 - protein, 258 aa, Arabidopsis thaliana
  misc_feature (32)..(252): Pfam Name: Abhydrolase_1 Pfam Description: alpha/beta hydrolase fold
  misc_feature: Public GI ID no. 16648679
  misc_feature: Bit score of 486.1 for HMM based on sequences of Figure 8
  misc_feature: Functional Homolog Of SEQ ID NO. 595
MERKHHFVLVHNAYHGAWIWYKLKPLLESAGHRVTAVELAASGIDPRPIQAVETVDEYSKPLIETLKSLQENEEGILVGFSFGGINIALAADIFPAKIKVLVFLNAFLPDTTHVPSHVLDKYMEMPGGLGDCEFSSHETRNGTMSLLKMGPKFMKARLYQNCPIEDYELAKMLHRQGSFFTEDLSKKEKFSEEGYGSVQRVYVMSSEDKAIPCDFIRWMIDNFNVSKVYEIDGGDHMVMLSKPQKLFDSLSAIATDYM

SEQ ID NO: 639 - protein, 263 aa, Arabidopsis thaliana
  misc_feature (35)..(257): Pfam Name: Abhydrolase_1 Pfam Description: alpha/beta hydrolase fold
  misc_feature: Public GI ID no. 15227863
  misc_feature: Bit score of 691.9 for HMM based on sequences of Figure 8
  misc_feature: Functional Homolog Of SEQ ID NO. 595
MSEEKRKQHFVLVHGACHGAWCWYKVKPLLEALGHRVTALDLAASGIDTTRSITDISTCEQYSEPLMQLMTSLPNDEKVVLVGHSFGGLSLALAMDKFPDKISVSVFVTAFMPDTKHSPSFVEEKFASSMTPEGWMGSELETYGSDNSGLSVFFSTDFMKHRLYQLSPVEDLELGLLLKRPSSLFINELSKMENFSEKGYGSVPRAYIVCKEDNIISEDHQRWMIHNYPANLVIEMEETDHMPMFCKPQLLSDHLLAIADNFC

SEQ ID NO: 640 - DNA, 795 bp, Populus balsamifera subsp. trichocarpa
  misc_feature: Ceres Annot ID no. 1451282
  misc_feature: Encodes the peptide sequence at SEQ ID NO. 641
atgggagaggtcaacaatcaaaaaaagcattttgttttgatccatggttcagttgcaggagcttggatatggtacaaggtcaagccaaggctagaggaagctggccaccgagtcacagctcttgacatggctgcatcaggggtgaacacaaaaacaattgaagaagttcgcactttcgatctgtataatgagcccttgatggagttcatggccaaattacctgaaaatgaaaaggttgtattggtggggcacagtttaggtggcttgaatctggcttttgctatggagaaattcccagagaaggtttctcttgctgtttttcttactgcaatcttgcctgataccgtgcaccagccatcttatatgttagaaaagtttgctgaaatcggtcccagggacgaagaatggcaagacactctgttttcattccatggaacccctgaagaaccgcatacatgtgttcatatgggttgcgagtttatgaagtgcaagccctttcatctttcctccgctgaggatctcgctctgcagatgctcttaaatagaccaggatcgatgtttgtggaaagcctgtccaaggcaaagaagttcactgatgagagatatggatcagtgccgcgagtttatattgtttgtactgaggatttaatgatgcttgcctcatttcagcgctggatgattgagcaaaatggggtaaaggaagtgatggagattcctgcagatcatatgccagttttttctacgcctacagaactctgccattctatactggagttggcacgcaagcatgcttag

SEQ ID NO: 641 - protein, 264 aa, Populus balsamifera subsp. trichocarpa
  misc_feature (36)..(258): Pfam Name: Abhydrolase_1 Pfam Description: alpha/beta hydrolase fold
  misc_feature: Ceres Annot ID no. 1451282
  misc_feature: Bit score of 540.7 for HMM based on sequences of Figure 8
  misc_feature: Functional Homolog Of SEQ ID NO. 595
MGEVNNQKKHFVLIHGSVAGAWIWYKVKPRLEEAGHRVTALDMAASGVNTKTIEEVRTFDLYNEPLMEFMAKLPENEKVVLVGHSLGGLNLAFAMEKFPEKVSLAVFLTAILPDTVHQPSYMLEKFAEIGPRDEEWQDTLFSFHGTPEEPHTCVHMGCEFMKCKPFHLSSAEDLALQMLLNRPGSMFVESLSKAKKFTDERYGSVPRVYIVCTEDLMMLASFQRWMIEQNGVKEVMEIPADHMPVFSTPTELCHSILELARKHA

SEQ ID NO: 642 - protein, 258 aa, Catharanthus roseus
  misc_feature (32)..(252): Pfam Name: Abhydrolase_1 Pfam Description: alpha/beta hydrolase fold
  misc_feature: Public GI ID no. 53830670
  misc_feature: Bit score of 723.2 for HMM based on sequences of Figure 8
  misc_feature: Functional Homolog Of SEQ ID NO. 595
MEVMKHFVTVHGVGHGAWVYYKLKPRIEAAGHRCTAVNLAASGINEKKLEEVRSSIDYAAPLLEVLDSVPENEKVILVGHSGGGMTAAVGMEKFPNKISLAVFLNAIMPDTENRPSYVLEEYTAKTPPEAWKDCQFSAYGDPPITSLVCGPEFISSTLYHLSPIEDHALGKILVRPGSLFIEDLLKAEKFTEEGFGSVPRVYVIAAEDKTIPPEFQRWMIENNPVKEVKEIKGADHMPMFSKPDELSQCLLDIAKKHA

SEQ ID NO: 643 - protein, 259 aa, Gentiana triflora var. japonica
  misc_feature (32)..(253): Pfam Name: Abhydrolase_1 Pfam Description: alpha/beta hydrolase fold
  misc_feature: Public GI ID no. 146272405
  misc_feature: Bit score of 682.5 for HMM based on sequences of Figure 8
  misc_feature: Functional Homolog Of SEQ ID NO. 595
MSPTKHFVAVHGVGHGAWVYYKLKPRIEAAGLKFTAIDLAAAGVNPKKLEEVNSLEEYCAPLFDVLAAVPEGEKVILVGHSGGGLSAAVGMEKFPKKISVAVFLNAIMPDTKNRPSYVMEEYTARTPIEAWKDTQFSAYGEPPITALLCGPEFISTSLYHLSPVEDHTLGKLLVRPGALFVEDLLKGAVKFTDEGFGSVPRVYVVATEDKTIPPEFQRWMIENNPVAEVKEIQGADHLPQFSKPDELTQVLVDIAKNHG

SEQ ID NO: 644 - DNA, 1739 bp, Glycine max
  misc_feature: Ceres Clone ID no. 625057
  misc_feature: Encodes the peptide sequence at SEQ ID NO. 645
ctattcttacacggcatggatctcgtggccactctgttttagtttaatcagaagcaaaatccacaaaactaacagtgtattaaaatttctgaacctgaaaaattgttattattttgatagggtttataggaaaagcagcatacccgagttcacaaacactgaacgccgctgctccgtagtttcgatcgacgcattcttcacttcaagatatcacaatgtctataacgcacagcctcactactccactctcttcttcttcctctgctttcttagctccttcttccttcaattgcaggggacaggtttcgttgcctgtgaagagcgtgagcatttgcaaatgcgttgccacacccgaagctgagactgcctacaagacaggggtcaatcgcaatccaaatatggggaaacttcaagctggctatctctttcccgagattgctagaagaaggtctgcgcacttgctgaagtaccctgatgctaaagtaataagccttggaattggtgatacaactgaacctattcctgaagtcataactgatgcaatgtcaaagagatcacatgcattgtcgactatagaaggatacagtgggtatggagctgaacaaggtgaaaagccattaagaagggcacttgcttcaacattttacagcgatcttggcatagaagaggatgatatatttgtctcagatggagcaaagtgtgatatatctcgtctccagattgtctttgggtcaaatgtaaaaatggctgtgcaagacccttcatatccggcctatgtagactctagtgtaattatgggccagactggcctcttccagaagaatgttgagaagtttgcaaacattgaatacatgaggtgtaatccggaaaatggtttcttccctgatttgtcttcaatttctcgaccagatataatatttttctgttctccaaacaatcctactggtgctgtggcaacaagggaacaactgacccaactagttcagtttgctaaggacaatggttctatagtaatccacgattcagcttatgcaatgtatatttctggtgacaaccctcgctcaatatttgaaattcctggagccaaagaggttgccattgagacttcatcatttagcaagtatgctgggttcactggagtccgattgggttggactgtggttccgaagcagttgctgttttctgatggatttcctgttgccaaggacttcaaccgtattgtatgcacttgtttcaatggtgcttcaaatatttcccaggcaggcggtctggcttgcctttcaccagaaggtcttaaggctatgcgtgatgttattggattctacaaggaaaatactaacataataatggagacatttgattctcttgggtttaaagtctatggagggaaagatgcaccatatgtgtgggtccattttcccggccgaagctcatgggatgtattcgctgagattcttgagaagactcatgtggttacaacccctggtagtggttttggacctggtggtgaaggttttatcagggttagtgcctttggtcacagggaaaatgtcttggaggcatgcagaaggttcaagcagctatacaagtgaagttagaatatctcatttggtttcaagagttgttctcttggactgaagctagggctgtcttatttaaataatgcaattgattttccgtggagtttagattataagatgtaaagacagggtttatcaattgaggaagtatatttttct

SEQ ID NO: 645 - protein, 458 aa, Glycine max
  misc_feature (88)..(453): Pfam Name: Aminotran_1_2 Pfam Description: Aminotransferase class I and II
  misc_feature: Ceres Clone ID no. 625057
  misc_feature: Bit score of 1204.2 for HMM based on sequences of Figure 5
MSITHSLTTPLSSSSSAFLAPSSFNCRGQVSLPVKSVSICKCVATPEAETAYKTGVNRNPNMGKLQAGYLFPEIARRRSAHLLKYPDAKVISLGIGDTTEPIPEVITDAMSKRSHALSTIEGYSGYGAEQGEKPLRRALASTFYSDLGIEEDDIFVSDGAKCDISRLQIVFGSNVKMAVQDPSYPAYVDSSVIMGQTGLFQKNVEKFANIEYMRCNPENGFFPDLSSISRPDIIFFCSPNNPTGAVATREQLTQLVQFAKDNGSIVIHDSAYAMYISGDNPRSIFEIPGAKEVAIETSSFSKYAGFTGVRLGWTVVPKQLLFSDGFPVAKDFNRIVCTCFNGASNISQAGGLACLSPEGLKAMRDVIGFYKENTNIIMETFDSLGFKVYGGKDAPYVWVHFPGRSSWDVFAEILEKTHVVTTPGSGFGPGGEGFIRVSAFGHRENVLEACRRFKQLYK

SEQ ID NO: 646 - DNA, 1701 bp, Gossypium hirsutum
  misc_feature: Ceres Clone ID no. 1925947
  misc_feature: Encodes the peptide sequence at SEQ ID NO. 647
aaggcatcacatttgtggttatttggccgcataaaaaagaagcagctttttccattaatttcggagggaaaaaaaaggggaaaaaaaatctgaaaatgtctctgatgaacaatctatcaacttcaatgatttcttcatcttcatctactttcttggctccaaccagtttcaattcaagcagaacccagagtgtttcagttccattgaaaagcatcaatatagttaaatgtgttgccactcctcaagaacaacaaaatgcttacaaaactaaagtttctcgcaatgcgaacatagctaagcttcaagctggttacctgtttccagaggttgccaggagaagggctgcacacttgctcaagtacccgaatgctcaagtgataagccttggaatcggtgatactactgaacctattccagatgttattacgtctgcaatggctaagaggtctcatgcattgtctacgctggagggttacagtggttatggagctgaacaaggtgaaaaggcattgagagctgcacttgcttcaacattctatcgcaaccttggcattgaggatgatgatatttttgtctcagatggtgctaaatgtgacatatctcgccttcaggttgttttcggatctaatgtcacaatggcagtgcaagacccgtcatacccggcttacgtagattccagcgttatcatgggtcagaccggacagtttcaaaaggatgttgagaagtatggaaatatcgagtatatgaggtgtacacccgagaatggattctttcctgatttatccaaagttgctagaactgatatcatattcttctgttcaccaaacaatcctactggtgctgctgcaacacgagagcaattgactcgattggttaagtttgcaaaggacaatgggtctatcatagtctatgattctgcatatgctatgtatatgtcagacgataaccctcgttctatctttgaaattccaggagcaaaagaggttgcaattgaaacagcttcttttagtaagtatgctgggtttactggggttcgtctcggttggactgttattccaaaacagcttctgttctcagatggattccctgttgccaaagacttcaaccgtatcgtttgtacttgctttaacggtgcatctaatattgcccaagctggtggcttggcttgcctttcatccgaagggctcgaggccatgcaagaggtgatcggcttctataaagaaaacaccaaaattatagtagaaacgttcaactcgcttgggtttaaagtatatggaggaaagaatgcaccatacgtgtgggttcacttccctggccgtagctcatgggatgtgttcagcgaaatactcgagaagacccacattgttactacgcctggaagtggtttcggacctggcggtgaaggtttcatcagagtcagcgcatttggtcacagggagaatgtcttggaagcttgcagaagattcaagcagctttacaattgaatctaatagcatttgactggttacctcggtttcagacccgagacgaaaggccgtatgcttctatgatttttgttctcaattccgtaatattgcttgtaatatctcgtcagattctatgcttagaaaagactagtaatgcttcttatttatcctgtaacattcactgaaaactacctttttatttatataaataaccgcttgtattcgccaagcaaat

SEQ ID NO: 647 - protein, 462 aa, Gossypium hirsutum
  misc_feature (92)..(457): Pfam Name: Aminotran_1_2 Pfam Description: Aminotransferase class I and II
  misc_feature: Ceres Clone ID no. 1925947
  misc_feature: Bit score of 1229.4 for HMM based on sequences of Figure 5
  misc_feature: Functional Homolog Of SEQ ID NO. 645
MSLMNNLSTSMISSSSSTFLAPTSFNSSRTQSVSVPLKSINIVKCVATPQEQQNAYKTKVSRNANIAKLQAGYLFPEVARRRAAHLLKYPNAQVISLGIGDTTEPIPDVITSAMAKRSHALSTLEGYSGYGAEQGEKALRAALASTFYRNLGIEDDDIFVSDGAKCDISRLQVVFGSNVTMAVQDPSYPAYVDSSVIMGQTGQFQKDVEKYGNIEYMRCTPENGFFPDLSKVARTDIIFFCSPNNPTGAAATREQLTRLVKFAKDNGSIIVYDSAYAMYMSDDNPRSIFEIPGAKEVAIETASFSKYAGFTGVRLGWTVIPKQLLFSDGFPVAKDFNRIVCTCFNGASNIAQAGGLACLSSEGLEAMQEVIGFYKENTKIIVETFNSLGFKVYGGKNAPYVWVHFPGRSSWDVFSEILEKTHIVTTPGSGFGPGGEGFIRVSAFGHRENVLEACRRFKQLYN

SEQ ID NO: 648 - DNA, 1386 bp, Populus balsamifera subsp. trichocarpa
  misc_feature: Ceres Annot ID no. 1514501
  misc_feature: Encodes the peptide sequence at SEQ ID NO. 649
atgtcgccgacgcaacttttatcgacttcgatttcttcttcttcctctgcttttttagccgcacctattgccttcaaagctagaaaccagaatgtttcgatcgcgtcgaaaacgccttctatttgcacgtgtgctgctgctcctcaagaacagaaaaccgtttacaaaacacaagtctcccgcaatgcaaatattgcaaagcttcaagctggttacttatttccagaggttgctcgaaggaggaatgcgcacatgctgaaataccctgatgcaaaagtgataagccttggaattggtgacactacagaacctatcccagaagttataacttctgcaatagcaaagagagcagaagcactgtctactttggagggttacagtggttatggacctgaacaaggtgaaaaacctttgagaactgcaattgcttcaacattttattcaggtcttgggatcgaggaggatgatatatttgtctctgatggtgccaaatgtgacatatctcgcctccagatggtatttggggcaaatgtaaccatggcagtgcaagatccatcatacccggcttacgttgattctagtgtcatcatgggccagactggacagtttcagaaagacgttgagaagtacggtaagattgaatacatgaggtgcactccagagaatggttttttccctgatttatccaaagtttctcgaacggatatcatatttttctgttcaccgaacaatcctactggttctgctgcaacaagggagcaactgacccaactagtacaatttgcaaaggacaatggatcaatcatcgtctatgattcagcatatgccatgtatatgtctgatgataacccacgatccatatttgaaattccgggagccaaagaggttgctttggagacatcatcttttagtaagtatgctgggtttactggagttcgtctggggtggactgttgttccaaaacagcttctatattctgatgggttcccagttgtaaaggatttcaaccgtgttgtttgcactagctttaatggggcatccaacatttgccaagctggtggtcgggcttgcctttcacctgaaggccttaaggcaatgagtgaggtgattggattctataaagaaaactccaacattataatggatacattcaattcgctcggttttaatgtatatggaggaaagaatgctccctatgtgtgggttcacttccctggccaaagctcgtgggatgttttcagtgaaattcttgagaaaactcatgtagttaccacacctgggagtggttttggacctggtggggaaggttttgtcagagtcagtgcttttggccacagggaaaatgttttagaagcctgcagaagattcaagcagctttacaattga

SEQ ID NO: 649 - protein, 461 aa, Populus balsamifera subsp. trichocarpa
  misc_feature (91)..(456): Pfam Name: Aminotran_1_2 Pfam Description: Aminotransferase class I and II
  misc_feature: Ceres Annot ID no. 1514501
  misc_feature: Bit score of 1200.7 for HMM based on sequences of Figure 5
  misc_feature: Functional Homolog Of SEQ ID NO. 645
MSPTQLLSTSISSSSSAFLAAPIAFKARNQNVSIASKTPSICTCAAAPQEQKTVYKTQVSRNANIAKLQAGYLFPEVARRRNAHMLKYPDAKVISLGIGDTTEPIPEVITSAIAKRAEALSTLEGYSGYGPEQGEKPLRTAIASTFYSGLGIEEDDIFVSDGAKCDISRLQMVFGANVTMAVQDPSYPAYVDSSVIMGQTGQFQKDVEKYGKIEYMRCTPENGFFPDLSKVSRTDIIFFCSPNNPTGSAATREQLTQLVQFAKDNGSIIVYDSAYAMYMSDDNPRSIFEIPGAKEVALETSSFSKYAGFTGVRLGWTVVPKQLLYSDGFPVVKDFNRVVCTSFNGASNICQAGGRACLSPEGLKAMSEVIGFYKENSNIIMDTFNSLGFNVYGGKNAPYVWVHFPGQSSWDVFSEILEKTHVVTTPGSGFGPGGEGFVRVSAFGHRENVLEACRRFKQLYN

SEQ ID NO: 650 - DNA, 1386 bp, Arabidopsis thaliana
  misc_feature: Ceres Annot ID no. 849672
  misc_feature: Encodes the peptide sequence at SEQ ID NO. 651
atgtcgtcgacccatcagttagtttcttcgatgatctcttcttcctcatccactttcttagccccttcaaattttaatctcagaactcgaaatgcttgcttacccatggcaaaacgggtcaatacttgcaaatgtgttgctacgccgcaagagaagatcgagtataagaccaaagtgtcacggaattcaaacatgtccaaacttcaggctggatacctattcccggagattgcaagaagaaggtctgcacacttgttgaaatatccagatgcacaagttataagtcttggaataggcgacacaactgagccaattcctgaagtgatcacttctgctatggcaaagaaagctcatgagttgtcaacaatagagggatatagtggttatggtgctgaacaaggtgcaaagccactgagagctgctattgcgaaaacattctacggtggccttggcataggggatgatgacgtttttgtttctgatggagctaaatgtgatatctcacgtctccaggttatgtttggttccaatgttacaattgctgttcaggatccttcatatccggcttatgtggactccagtgttattatgggtcagactgggcaatttaacactgatgtgcaaaagtatggaaacatcgagtacatgagatgcactccagagaatggcttctttcccgacttgtccaccgttggcaggacagatataattttcttctgttccccaaataaccctacgggtgctgctgccacgagagagcaactaacgcagttagttgagtttgcaaagaagaacggttctataatagtgtatgattccgcctatgcaatgtacatgtctgatgataacccacgatccatcttcgaaatccctggagcagaggaggtcgctatggagacagcttcgttcagcaaatatgctggtttcactggagttcgacttggttggactgtcatcccgaaaaagctactctattcagacggtttccctgttgccaaagacttcaatcggattatctgcacttgtttcaatggtgcatctaatatctctcaagctggtgctcttgcttgccttacacccgaaggacttgaggcaatgcataaggtgattggattctataaagaaaacacaaacataatcattgacacattcacatctctcgggtatgatgtatatggaggaaagaatgcgccttacgtatgggttcacttcccgaaccaaagctcatgggatgtgtttgctgagattctggagaagactcatgtggttacaactccaggaagtgggtttggaccagggggtgaagggttcgttcgtgtcagtgcctttggtcacagagagaacatcttagaggcatgtcgaagattcaagcagctttacaaatga

SEQ ID NO: 651 - protein, 461 aa, Arabidopsis thaliana [sequence omitted]

SEQ ID NO: 652 - protein, 459 aa, Vitis vinifera
  misc_feature (89)..(454): Pfam Name: Aminotran_1_2 Pfam Description: Aminotransferase class I and II
  misc_feature: Public GI ID no. 157355942
  misc_feature: Bit score of 1189.7 for HMM based on sequences of Figure 5
  misc_feature: Functional Homolog Of SEQ ID NO. 645
MYSLMSSPSISSSSSSFLGQTHFDSRNPNACLPTKDSWICKCVATPSTETTAHTTKVSRNANMAKLQAGYLFPEIARRRSAHMLKYPDAQVISLGIGDTTEPIPEVITSGMAKKAHALSTLEGYSGYGAEQGEKQLRAAIASTFYGDLSIEESDIFVSDGAKSDISRLQVMFGSNVTMAVQDPSYPAYVDLSVILGQTGQFQKDVEKYGNIEYMKCNPENGFFPDLSTVSRTDIIFFCSPYNPTGNAATREQLTRLVQFAKDNGSILVYDSGYAMYISDDSPRSIFEIPGAKEVAIEVSSFSKYAGFTGVRLGWTVVPKELLYSDGFPVAKDFNRIECTTFNAASNISQASGLACLSPEGLEAMHKLVGFYKENTNIIMETFTSLGFSVYGGKNAPYVWVHFPGQSSWDVFSEILEKTHVVTTPGSGFGPAGDGFIRVCAFSHRGNVLEACKRFKRLYK

SEQ ID NO: 653 - protein, 464 aa, Oryza sativa subsp. japonica
  misc_feature (94)..(459): Pfam Name: Aminotran_1_2 Pfam Description: Aminotransferase class I and II
  misc_feature: Public GI ID no. 115452503
  misc_feature: Bit score of 1198.1 for HMM based on sequences of Figure 5
  misc_feature: Functional Homolog Of SEQ ID NO. 645
MAASPAAGAAAATVSSFVSPSSFSSVKASKPDRLRPARRAAAVNVRCVSSPPATETSFKTKVPRNANMAKLQAGYLFPEIARRRAAHLLKFPDAKIISLGIGDTTEPIPDVITNAMAKRAHALSTVDGYSGYGAEQGEKKLRAAIAATYYADLGIEETDIFVSDGAKCDISRLQVLFGSNVKIAVQDPSYPAYVDSSVIMGQTGLYQEDVQKYGNIEYMKCSPENGFFPDLSSVPRTDIIFFCSPNNPTGAAASRDQLTKLVKFAKDNGSIIVYDSAYAMYISDDSPKSIFEIPGAKEVAIETASFSKYAGFTGVRLGWTVVPKELLFSDGHPVAKDFNRIVCTCFNGASNISQAGGLGCLSPEGLKAMSDVVGFYKENTKIIVDTFTSLGFNVYGAKNAPYVWVHFPGRNSWDVFAEILEKAHVVTTPGSGFGPGGEGFVRVSAFGHRENIIEAARRLKQLYK

SEQ ID NO: 654 - DNA, 1695 bp, Panicum virgatum
  misc_feature: Ceres Clone ID no. 1790933
  misc_feature: Encodes the peptide sequence at SEQ ID NO. 655
acccgcactgcacactccccttaccctttcctacgccgccgcctcttctgctgacgccatggccgccgcccccgcctcttctgccgccgctatggccgcggcacccgcaatcaccgcgtcctcctcctttgtctcgtcgtcgccgtgctctctcagggtgtcgaagacaagcccccggcgacccacgggaagagtgtcccacaaaatcagctgcgtcagtagcccaccggccgccgaaacatcttacaagactagtgtcccgcgcaatgctaacatggccaagctccaagcaggatatttatttcctgagattgccaggagaagagcagctcatttgctcaagttccctgatgctaagattataagccttgggataggtgacactacggagcccattccagatgtcataacgaatgccatggcagagagagcacatgccttatcaacaattgatggctacagtggttatggagctgagcaaggtgaaaagaaactaaggtcagcaattgctgcaacctactatgtggaccttggtattgaagattcagacatatttgtctctgatggtgccaaatgtgacatttcccgcctgcaggttctttttggatctaatgtgacgattgcggtccaagacccatcataccctgcatatgttgattcaagtgttatcatgagccaaactggcttatatcagcaagatgttcagaagtacgggaacatcgagtacatgagatgcaatcctgaaaatggatttttccctgatctgtcaactgtcccacgtacagatataattttcttttgctcaccgaacaaccccactggtgctgctgcctctcgggaccaactgacgagactagtcaaatttgctaaggacaatgggtctatcattgtctatgattctgcctatgctatgtacatatcagatgatagcccaaagtctatctttgaaattcctggtgcgagagaggttgccattgagacagcatcattctcgaaatatgctgggttcactggtgtccgtctaggttggactgttgtccccaaggagcttcttttctcagatgggcatccagtcgctaaagatttcaaccgcattgtgtgcacctgcttcaatggcgcatcaaacattgctcaagctggtggcttagcttgcctctctccagagggtctgaaggctatgcatgatgttgttggcttctacaaggagaatactgaaataattgtcgacacgtttacatcgcttggattcaatgtatatggtgccaagaacgctccttatgtgtgggtgcacttccctggtcgcaattcgtgggatgtgttcgctgagatccttgagaaggcgaacgttgtcactacgcctggcagtggatttggacctggcggcgaaggctttgtgagggtcagcgcgtttggccacagagaaaacatcattgaagccgctaggagattaaaacagctgtacaagtgagcactgacgcagcttcagtaacgtcttggaaggacgatatcaataagattgcatcatgatttggaacaccaaattcgctctgtcgagctacttggagatattagaagcgaaacttgataatttcctaggcttttatgttgtggtagttctttcaaataatttccaattcgaaagatgcttgttgtatccccgagacatttgaatcaccaggtagtggttatatggcc

SEQ ID NO: 655 - protein, 469 aa, Panicum virgatum
  misc_feature (99)..(464): Pfam Name: Aminotran_1_2 Pfam Description: Aminotransferase class I and II
  misc_feature: Ceres Clone ID no. 1790933
  misc_feature: Bit score of 1198.3 for HMM based on sequences of Figure 5
  misc_feature: Functional Homolog Of SEQ ID NO. 645
MAAAPASSAAAMAAAPAITASSSFVSSSPCSLRVSKTSPRRPTGRVSHKISCVSSPPAAETSYKTSVPRNANMAKLQAGYLFPEIARRRAAHLLKFPDAKIISLGIGDTTEPIPDVITNAMAERAHALSTIDGYSGYGAEQGEKKLRSAIAATYYVDLGIEDSDIFVSDGAKCDISRLQVLFGSNVTIAVQDPSYPAYVDSSVIMSQTGLYQQDVQKYGNIEYMRCNPENGFFPDLSTVPRTDIIFFCSPNNPTGAAASRDQLTRLVKFAKDNGSIIVYDSAYAMYISDDSPKSIFEIPGAREVAIETASFSKYAGFTGVRLGWTVVPKELLFSDGHPVAKDFNRIVCTCFNGASNIAQAGGLACLSPEGLKAMHDVVGFYKENTEIIVDTFTSLGFNVYGAKNAPYVWVHFPGRNSWDVFAEILEKANVVTTPGSGFGPGGEGFVRVSAFGHRENIIEAARRLKQLYK

SEQ ID NO: 656 - DNA, 1389 bp, Sorghum bicolor
  misc_feature: Ceres Annot ID no. 8641620
  misc_feature: Encodes the peptide sequence at SEQ ID NO. 657
atggcagcagcccctgccggtgcccccgcaatcaccgcctcatcctcctttcttgcttcgccgccgttcgctctcaaggcatcgacgactagccaccgccgacctgcggggagagtctccgtcaacatccgctgcgtcagtagcccgccggccgtcgacacatcttacaagactaatgtcccgcgcaatgctaacatggccaagctccaagcaggatatctgtttcctgagattgccaggagaagagcagctcatttgctgaagtatccagatgccaagataataagccttgggataggtgacactaccgagcccattccaaatgtcataacaaatgccatggcagagagagcacttgccttgtcaacaattgatggctacagcggttatggagccgagcaaggtgaaaagaaactcagagcagcaattgctgcaacctactatgcggaccttggtattgaagattcagatatttttgtctctgatggtgccaagtgtgacatatctcgcttgcaggtcctttttggatctaatgtgacaattgcggtccaagatccctcataccctgcatatgttgattcaagtgttatcatgggccaaactgacttatatcagcaagatgttcagaagtacggaaacattcaatacatgagatgcagtccagaaaatggatttttccctgatctgtcaactatccctcggacagatattattttcttttgttcacccaacaatcctactggtgctgctgcatctcgggaccaactgaccaaattagtaaaatttgcaaaggacaatgggtccatcattgtctatgattctgcttatgcaatgtacatatcagatgacagcccaaagtctatctttgaaattcctggagcaaaggaggttgctcttgagacagcgtcattctcgaaatatgctgggttcactggtgtccgtctaggttggactgttgtccccaaggagctccttttctctgatggacatccagttgctaaagatttcaatcgcatagtctgcacttgcttcaatggtgcatcaaacatttcacaagctggtggtttagcttgcctctctccagagggtctgaaggctatgcatgatgttgttggcttctacaaggagaacactgaaataattgttgacacatttacatcacttggattcaacgtgtatggtgcgaagaacgctccttacgtatgggtgcacttccctggccgcaattcgtgggacgtgtttgctgagatcctggagaaggcgaatgtggttactactcctggcagtggatttggaccgggtggcgaaggctttgtgagggtcagcgcattcggacacagagataacatcattgaagctgcaaggagattaaagcagctgtacaagtga

SEQ ID NO: 657 - protein, 462 aa, Sorghum bicolor
  misc_feature (92)..(457): Pfam Name: Aminotran_1_2 Pfam Description: Aminotransferase class I and II
  misc_feature: Ceres Annot ID no. 8641620
  misc_feature: Bit score of 1203.6 for HMM based on sequences of Figure 5
  misc_feature: Functional Homolog Of SEQ ID NO. 645
MAAAPAGAPAITASSSFLASPPFALKASTTSHRRPAGRVSVNIRCVSSPPAVDTSYKTNVPRNANMAKLQAGYLFPEIARRRAAHLLKYPDAKIISLGIGDTTEPIPNVITNAMAERALALSTIDGYSGYGAEQGEKKLRAAIAATYYADLGIEDSDIFVSDGAKCDISRLQVLFGSNVTIAVQDPSYPAYVDSSVIMGQTDLYQQDVQKYGNIQYMRCSPENGFFPDLSTIPRTDIIFFCSPNNPTGAAASRDQLTKLVKFAKDNGSIIVYDSAYAMYISDDSPKSIFEIPGAKEVALETASFSKYAGFTGVRLGWTVVPKELLFSDGHPVAKDFNRIVCTCFNGASNISQAGGLACLSPEGLKAMHDVVGFYKENTEIIVDTFTSLGFNVYGAKNAPYVWVHFPGRNSWDVFAEILEKANVVTTPGSGFGPGGEGFVRVSAFGHRDNIIEAARRLKQLYK

SEQ ID NO: 658 - DNA, 1718 bp, Zea mays
  misc_feature: Ceres Clone ID no. 281497
  misc_feature: Encodes the peptide sequence at SEQ ID NO. 659
aaaaaaactcacatcgttccctacaccctactccctccgtcagccagcgaagttccttcagtcactcaacaccttacgtccctagccatcctccgccgcctccgtctctgcttccctagagccgtcgcgatggcagcagcccctgccggtgcccctgcaatcaccgcatcctcctcctttgtttcttcgtctccgttctgtctcaaggcatcgatgaccagccagcgccgacccgcggggagagtctccatcgtcatccgctgcgtcagtagcccgccggccgtcgacacatctttcaagactaatgtcccgcgcaatgctaatatggccaaactccaagcaggatatttgtttcctgagattgccaggagaagagccgctcatttgctgaagtttccagatgccaaaattataagccttggaataggcgacactaccgagcccattccaaatgtcataacaaatgccatggcagagagagcacatgccttgtcaacaattgatggctacagcggttatggagctgagcaaggtgaaaagaaactcagagcagcaattgctgcaacctactatgcggaccttggtattgaagattcagacatatttgtctctgatggtgccaaatgtgacatatctcgcttgcaggtcctttttggatctaatgtgacaattgcggtccaagatccatcataccctgcatatgttgattcaagtgttatcatggggcaaactgatttatatcagcaagacgttcagaagtatggaaacattgagtacatgagatgcggtccagaaaatggattttttcctgatctgtcaactgtccctaggacagatattattttcttttgttcacccaacaatcctactggtgctgctgcatctcgggaccaactaaccaaattagtaaaatttgcaaaggacaacgggtccatcatagtctatgattctgcttatgcaatgtacatatcagatgacagcccaaagtctatctttgaaattcctggagcaaaggaggttgctattgagacagcctcattctcgaaatacgctgggttcacaggtgtccgtmtaggttggactgttgtccccaaggagctccttttctcggatggacatccagttgctaaagatttcaatcgcatagtttgcacttgcttcaatggtgcatcaaacattgcgcaagctggtggtttagcctgcctctctccagacggtctaaaggctatgcaagatgttgttggcttctacaaggagaacactgaaataatsgttgagacatktacatcactcggattcaacgtgtatggcgccaagaacgctccatacgtatgggtgcacttccctggccgcaattcgtgggatgtgttcgctgagatcctggagaaggccaatgtggtcactactcctggcactggatttggaccgggtggcgaaggctttgtgagggtcagcgcgttcgggcacagagagaacatcattgaagccgcaaggaggtyaaagcagctgtataagtgagcaccgatgcagcttctgtgccctcctagacagatgtatcaataagaacacatcagggcaccaaaaatcgcttggtgaagctgccagaagatgttagattttgaacttttttttttaattctcgtgcggtgtctacattcraaccatttcgaactctagacaatgcttgttgtaatcctgagacccttcattcactggtg

SEQ ID NO: 659 - protein, 462 aa, Zea mays
  misc_feature (92)..(457): Pfam Name: Aminotran_1_2 Pfam Description: Aminotransferase class I and II
  misc_feature: Ceres Clone ID no. 281497
  misc_feature: Bit score of 1192.4 for HMM based on sequences of Figure 5
  misc_feature: Functional Homolog Of SEQ ID NO. 645
  misc_feature (315)..(315): Xaa is any aa, unknown, or other
  misc_feature (381)..(381): Xaa is any aa, unknown, or other
  misc_feature (385)..(385): Xaa is any aa, unknown, or other
  misc_feature (457)..(457): Xaa is any aa, unknown, or other
MAAAPAGAPAITASSSFVSSSPFCLKASMTSQRRPAGRVSIVIRCVSSPPAVDTSFKTNVPRNANMAKLQAGYLFPEIARRRAAHLLKFPDAKIISLGIGDTTEPIPNVITNAMAERAHALSTIDGYSGYGAEQGEKKLRAAIAATYYADLGIEDSDIFVSDGAKCDISRLQVLFGSNVTIAVQDPSYPAYVDSSVIMGQTDLYQQDVQKYGNIEYMRCGPENGFFPDLSTVPRTDIIFFCSPNNPTGAAASRDQLTKLVKFAKDNGSIIVYDSAYAMYISDDSPKSIFEIPGAKEVAIETASFSKYAGFTGVRXGWTVVPKELLFSDGHPVAKDFNRIVCTCFNGASNIAQAGGLACLSPDGLKAMQDVVGFYKENTEIXVETXTSLGFNVYGAKNAPYVWVHFPGRNSWDVFAEILEKANVVTTPGTGFGPGGEGFVRVSAFGHRENIIEAARRXKQLYK

SEQ ID NO: 660 - protein, 465 aa, Physcomitrella patens subsp. patens
  misc_feature (92)..(457): Pfam Name: Aminotran_1_2 Pfam Description: Aminotransferase class I and II
  misc_feature: Public GI ID no. 168013851
  misc_feature: Bit score of 1134.3 for HMM based on sequences of Figure 5
  misc_feature: Functional Homolog Of SEQ ID NO. 645
MSIPSARLCTVPATRNLSSSVSFSTATSLLPKVSVTRGASVSLIRCIAEPAEKTTYTTSVNRNANIAKLQAGYLFPEIARRRNAHIQRYPDAKVISLGIGDTTEPIPTVITGAMEARARALSTLEGYSGYGAEQGEKPLRAGIGAAFYADLGIDETEIFVSDGAKCDITRLQLVFGPNVTMAAQDPSYPAYVDTSVMMGQTGLFQSDSQQYSKIQYMKCTPENDFFPDLSSTPRTDIIFFCSPNNPTGASASRKQLEELVAFAKKNGSIIVYDSAYAIYTSDDSPKSIYEIPGAKECAIETASFSKYAGFTGVRLGWTVVPKALKFADGHPVHTDFNRVMTTCFNGASNVAQAGGLACVSSEGLKAMHETVKFYKENTKILVETFESLGFKTFGGKNAPYVWVQFPGKSSWDVFSEILEQTHIVTTPGSGFGPGGEGFIRASAFGHRENILEASRRLKEYFGSKK

SEQ ID NO: 661 - DNA, 1503 bp, Arabidopsis thaliana
  misc_feature: Ceres Clone ID no. 143214
  misc_feature: Encodes the peptide sequence at SEQ ID NO. 662
attttgctctgcaaatttgtctgaaaaaatctttgtgcgaagcaggaaaaatgtcgtcgacccatcagttagtttcttcgatgatctcttcttcctcatccactttcttagccccttcaaattttaatctcagaactcgaaatgcttgcttacccatggcaaaacgggtcaatacttgcaaacttcaggctggatacctattcccggagattgcaagaagaaggtctgcacacttgttgaaatatccagatgcacaagttataagtcttggaataggcgacacaactgagccaattcctgaagtgatcacttctgctatggcaaagaaagctcatgagttgtcaacaatagagggatatagtggttatggtgctgaacaaagtgcaaagccactgagagctgctattgcgaaaacattctacggtggccttggcataggggatgatgacgtttttgtttctgatggagctaaatgtgatatctcacgtctccaggttatgtttggttccaatgttacaattgctgttcaggatccttcatatccggcttatgtggactccagtgttattatgggtcagactgggcaatttaacactgatgtgcaaaagtatggaaacatcgagtacatgagatgcactccagagaatggcttctttcccgacttgtccaccgttggcaggacagatataattttcttctgttccccaaataaccctacgggtgctgctgccacgagagagcaactaacgcagttagttgagtttgcaaagaagaacggttctataatagtgtatgattccgcctatgcaatgtacatgtctgatgataacccacgatccatcttcgaaatccctggagcagaggaggtcgctatggagacagcttcgttcagcaaatatgctggtttcactggagttcgacttggttggactgtcatcccgaaaaagctactctattcagacggtttccctgttgccaaagacttcaatcggattatctgcacttgtttcaatggtgcatctaatatctctcaagctggtgctcttgcttgccttacacccgaaggacttgaggcaatgcataaggtgattggattctataaagaaaacacaaacataatcattgacacattcacatctctcgggtatgatgtatatggaggaaagaatgcgccttacgtatgggttcacttcccgaaccaaagctcatgggatgtgtttgctgagattctggagaagactcatgtggttacaactccaggaagtgagtttggaccagggggtgaagggttcgttcgtgtcagtgcctttggtcacagagagaacatcttagaggcatgtcgaagattcaagcagctttacaaatgaagaaccttgtttgtaatcgttcctcatcatcatcaccctctttaatgacatgatttgagttaaaataatgtcgtttccattgttttctggaatttgtagaagacacttttgacaccagtgtttcaagcaatttggc

SEQ ID NO: 662 - protein, 438 aa, Arabidopsis thaliana
  misc_feature (68)..(433): Pfam Name: Aminotran_1_2 Pfam Description: Aminotransferase class I and II
  misc_feature: Ceres Clone ID no. 143214
  misc_feature: Bit score of 1113.6 for HMM based on sequences of Figure 5
  misc_feature: Functional Homolog Of SEQ ID NO. 645
MSSTHQLVSSMISSSSSTFLAPSNFNLRTRNACLPMAKRVNTCKLQAGYLFPEIARRRSAHLLKYPDAQVISLGIGDTTEPIPEVITSAMAKKAHELSTIEGYSGYGAEQSAKPLRAAIAKTFYGGLGIGDDDVFVSDGAKCDISRLQVMFGSNVTIAVQDPSYPAYVDSSVIMGQTGQFNTDVQKYGNIEYMRCTPENGFFPDLSTVGRTDIIFFCSPNNPTGAAATREQLTQLVEFAKKNGSIIVYDSAYAMYMSDDNPRSIFEIPGAEEVAMETASFSKYAGFTGVRLGWTVIPKKLLYSDGFPVAKDFNRIICTCFNGASNISQAGALACLTPEGLEAMHKVIGFYKENTNIIIDTFTSLGYDVYGGKNAPYVWVHFPNQSSWDVFAEILEKTHVVTTPGSEFGPGGEGFVRVSAFGHRENILEACRRFKQLYK

SEQ ID NO: 663 - DNA, 1678 bp, Panicum virgatum
  misc_feature: Ceres Clone ID no. 1781022
  misc_feature: Encodes the peptide sequence at SEQ ID NO. 664
gtcccccgtgacagcgaagcagaggctcatcaccctacccaagtacccatcctccgccgccgccatggcagcagcccccaccggcggccccgccatcaccatgtcctcctcctccttcctctctccgtcgccgttctatgtcaaggcgtcgaggaccagccaccgccgacccgccaggagaatgcctgtcaccgtccgctgcgtcagtagcccgccggccgccgatacagctcacaagactagtgtcccgcgcaatgcaaacatgaccaagctccaagcaggatatctgtttcctgagatagccaggagaagagcagctcatttgctgaagtaccctgatgctgagattataagccttgggataggtgacactaccgagcccattcctgacgtcataacaaatgccatggcagagagagcacatgccttatcaacaattgatggctacagtggttatggagctgagcaaggtgaaaagaaactaagggcagcaattgctgcaacctactatgcggaccttggtattgaagattcagacatatttgtctctgatggtgccaaatgtgacatttctcgcctccaggtcctttttggatctaatgtgacaattgcggtccaagacccatcataccctgcatatgttgattcaagtgttatcatgggccaaaccgacttatatcagcaagatgttcagaagtatgggaacattgagtacatgagatgcaatcccgaaaatggatttttccctgatctgtcaactgtcccacgaacagatataattttcttttgttcacccaacaaccctactggtgctgctgcatctcgggaccaactaacaaaactagtcaaatttgctaaggacaatgggtccatcattgtctatgattctgcttatgctatgtacatatcagatgatagtccaaagtccatctttgaaattcctggagcaaaagaggttgccattgagacagcatcattctcaaaatatgctgggttcactggtgtccgtctaggttggactgttgtccccaaggaacttcttttctcagatggacatccagttgctaaagatttcaaccgcatagtctgcacttgcttcaatggcgcatcaaacattgctcaagctggtggcttagcttgcctctctacagagggcctgaaggctatgcgtgacgtcgttggcttctacaaggagaacactgaaataattgttgacacatttacatcgcttgggttcaacgtgtatggtgccaagaacgctccttacgtgtgggtgcacttccctgatcgcaagtcgtgggatgtgttcgctgagatcctcgagaaggcaaacgttgtcactactcctggcagtggatttggaccaggcggcgaaggctttgtgagggtcagtgcattcggccacagagagaacatcattgaagccgctaggagattaaagcatatgtacaaatgagcaccgacgcaacttctgtatcgcacttgaaggactgtaccaataagatcacagctggatttggaatgccaaatcctctctttggagctaccaggagatattagaagtgatacttgataatttcgtaggctttttttttaatggtgttactccattcaaaccatttccattttgaaataatgctttgtatacctgaggcgtttaaatcaccaatggttatat

SEQ ID NO: 664 - protein, 463 aa, Panicum virgatum
  misc_feature (93)..(458): Pfam Name: Aminotran_1_2 Pfam Description: Aminotransferase class I and II
  misc_feature: Ceres Clone ID no. 1781022
  misc_feature: Bit score of 1192.3 for HMM based on sequences of Figure 5
  misc_feature: Functional Homolog Of SEQ ID NO. 645
MAAAPTGGPAITMSSSSFLSPSPFYVKASRTSHRRPARRMPVTVRCVSSPPAADTAHKTSVPRNANMTKLQAGYLFPEIARRRAAHLLKYPDAEIISLGIGDTTEPIPDVITNAMAERAHALSTIDGYSGYGAEQGEKKLRAAIAATYYADLGIEDSDIFVSDGAKCDISRLQVLFGSNVTIAVQDPSYPAYVDSSVIMGQTDLYQQDVQKYGNIEYMRCNPENGFFPDLSTVPRTDIIFFCSPNNPTGAAASRDQLTKLVKFAKDNGSIIVYDSAYAMYISDDSPKSIFEIPGAKEVAIETASFSKYAGFTGVRLGWTVVPKELLFSDGHPVAKDFNRIVCTCFNGASNIAQAGGLACLSTEGLKAMRDVVGFYKENTEIIVDTFTSLGFNVYGAKNAPYVWVHFPDRKSWDVFAEILEKANVVTTPGSGFGPGGEGFVRVSAFGHRENIIEAARRLKHMYK

SEQ ID NO: 665 - DNA, 1612 bp, Triticum aestivum
  misc_feature: Ceres Clone ID no. 618639
  misc_feature: Encodes the peptide sequence at SEQ ID NO. 666
actgatttccccctccacctatctacccgccgccgccacgcccgccgccgacgacgatggcaactaccgcctcaccctccaccacgaccaccccccggtccttcctctcgtcgccttccttctccctcagggcatcgaagtcgagccacctccggacgacgagaaggctgcccgttaatgtacgctgcgccagtagctctccggccgccgatacatcttacacgacgaaggtctcgcggaatgccaacatagccaagctccaagcaggctatttgtttccggagattgccagaagaagggcagctcatctgctaaagcatcctgacgccaaaattataagtctgggaataggtgacactactgagcccattccggaggtcataacaaatgccatggcagagagagcacatgctttatccacagtggatggctacagtggttatggagctgaacaaggtgaaaagaaactaagggcagcaattgctgcaacctactatgcggatcttggtattgacgaaactgatatatttgtctctgatggtgccaaatgtgacatttctcgcctacaggttctttttggatctaaagtgaagattgcagttcaagatccatcatatcccgcatatgttgattcaagtgttatcatggggcaaactgacttatatcagcaggatgttcagaagtatggaaatattgaatacatgagatgcagtcctgaaaatggatttttccctgatctttccaaggtcccacggacagatatcatattcttctgttcacccaacaatcctactggtgctgctgcatctagggaccagctaacacagttggtcaaattcgcaaaggacaatgggtccataatagtctatgattctgcttatgccatgtacatatcagatgacagcccaaaatccatctttgaaattcctggggcgaaggaggttgccctcgagacagcatctttctctaaatatgctgggttcactggtgtccgactgggttggactgtggtccctaaggagctccttttctccgatgggcatccagtcgctaaagatttcaaccgcatagtctgcacttccttcaatggcgcatcgaccatctctcaggccggtggtttaggctgcctctctccagagggtctaaaggctatgcaagacgttgtcggattctacaaggagaacaccaaaatcattgtcgacacgtttgagtcgctcggattcaacgtctacggtgcgaagaatgccccctatgtgtgggtgcacttccctgaccgcaattcctgggatgtctttgccgagatccttgagaaggcaaacgtggtcactactcccggcagtggatttgggcccggcggtgagggctttgtgagggtcagtgcatttggccacagagagaacattattgaagctgcgagaagactgaagcagctatacaaatgagcgttggtttagcaggtggccccctctgtcgctggggagccaggcaataagaacccagcagcatttggagcacgaggtttgcttctcggctgctgggaagtgttagaatagagacagggtgttgtttttgctccattcgtaaccatttaatactggaaatttgcttgttc

SEQ ID NO: 666 - protein, 461 aa, Triticum aestivum
  misc_feature (91)..(456): Pfam Name: Aminotran_1_2 Pfam Description: Aminotransferase class I and II
  misc_feature: Ceres Clone ID no. 618639
  misc_feature: Bit score of 1169.6 for HMM based on sequences of Figure 5
  misc_feature: Functional Homolog Of SEQ ID NO. 645
MATTASPSTTTTPRSFLSSPSFSLRASKSSHLRTTRRLPVNVRCASSSPAADTSYTTKVSRNANIAKLQAGYLFPEIARRRAAHLLKHPDAKIISLGIGDTTEPIPEVITNAMAERAHALSTVDGYSGYGAEQGEKKLRAAIAATYYADLGIDETDIFVSDGAKCDISRLQVLFGSKVKIAVQDPSYPAYVDSSVIMGQTDLYQQDVQKYGNIEYMRCSPENGFFPDLSKVPRTDIIFFCSPNNPTGAAASRDQLTQLVKFAKDNGSIIVYDSAYAMYISDDSPKSIFEIPGAKEVALETASFSKYAGFTGVRLGWTVVPKELLFSDGHPVAKDFNRIVCTSFNGASTISQAGGLGCLSPEGLKAMQDVVGFYKENTKIIVDTFESLGFNVYGAKNAPYVWVHFPDRNSWDVFAEILEKANVVTTPGSGFGPGGEGFVRVSAFGHRENIIEAARRLKQLYK

SEQ ID NO: 667 - protein, 461 aa, Populus balsamifera subsp. trichocarpa
  misc_feature (91)..(456): Pfam Name: Aminotran_1_2 Pfam Description: Aminotransferase class I and II
  misc_feature: Public GI ID no. 118483001
  misc_feature: Bit score of 1195.3 for HMM based on sequences of Figure 5
  misc_feature: Functional Homolog Of SEQ ID NO. 645
MSPTQLLSTSISSSSSAFLAAPIAFKARNQNVSIASKTPSICTCAAAPQEQKTVYKTQVSRNANIAKLQAGYLFPEVARRRNAHMLKYPDAKVISLGIGDTTEPIPEVITSAIAKRAEALSTLEGYGGYGPEQGEKPLRTAIASTFYSGLGIEEDDIFVSDGAKCDISRLQMVFGANVTMAVQDPSYPAYVDSSVIMGQTGQFQKDIEKYGKIEYMRCTPENGFFPDLSKVSRTDIIFFCSPNNPTGSAATREQLTQLVQFAKDNGSIIVYDSAYAMYMSDDNPRSIFEIPGAKEVALETSSFSKYAGFTGVRLGWTVVPKQLLYSDGFPVVKDFNRVVCTSFNGASNICQAGGRACLSPEGLKAMSEVIGFYKENSNIIMDTFNSLGFNVYGGKNAPYVWVHFPGQSSWDVFSEILEKTHVVTTPGSGFGPGGEGFVRVSAFGHRENVLEACRRFKQLYN

SEQ ID NO: 668 - DNA, 1582 bp, Arabidopsis thaliana
  misc_feature: Ceres Clone ID no. 38404
  misc_feature: Encodes the peptide sequence at SEQ ID NO. 669
aggttcatttgctctgcaaatttgtctgaaaaaatctttgtgcgaatcaggaaaaatgtcgtcgacccatcagttagtttcttcgatgatctcttcttcctcatccactttcttagccccttcaaattttaatctcagaactcgaaatgcttgcttacccatggcaaaacgggtcaatacttgcaaatgtgttgctacgccgcaagagaagatcgagtataagaccaaagtgtcacggaattcaaacatgtccaaacttcaggctggatacctattcccggagattgcaagaagaaggtctgcacacttgttgaaatatccagatgcacaagttataagtcttggaataggcgacacaactgagccaattcctgaagtgatcacttctgctatggcaaagaaagctcatgagttgtcaacaatagagggatatagtggttatggtgctgaacaaggtgcaaagccactgagagctgctattgcgaaaacattctacggtggccttggcataggggatgatgacgtttttgtttctgatggagctaaatgtgatatctcacgtctccaggttatgtttggttccaatgttacaattgctgttcaggatccttcatatccggcttatgtggactccagtgttattatgggtcagactgggcaatttaacactgatgtgcaaaagtatggaaacatcgagtacatgagatgcactccagagaatggcttctttcccgacttgtccaccgttggcgggacagatataattttcttctgttccccaaataaccctacgggtgctgctgccacgagagagcaactaacgcagttagttgagtttgcaaagaagaacggttctataatagtgtatgattccgcctatgcaatgtacatgtctgatgataacccacgatccatcttcgaaatccctggagcagaggaggtcgctatggagacagcttcgttcagcaaatatgctggtttcactggagttcgacttggttggactgtcatcccgaaaaagctactctattcagacggtttccctgttgccaaagacttcaatcggattatctgcacttgtttcaatggtgcatctaatatctctcaagctggtgctcttgcttgccttacacccgaaggacttgaggcaatgcataaggtgattggattctataaagaaaacacaaacataatcattgacacattcacatctctcgggtatgatgtatatggaggaaagaatgcgccttacgtatgggttcacttcccgaaccaaagctcatgggatgtgtttgctgagattctggagaagactcatgtggttacaactccaggaagtgggtttggaccagggggtgaagggttcgttcgtgtcagtgcctttggtcacagagagaacatcttagaggcatgtcgaagattcaagcagctttacaaatgaagaaccttgtttgtaatcgttcctcatcatcatcaccctctttaatgacatgatttgagttaaaataatgtcgtttccattgttttctggaatttgtagaagacacttttgacaccagtgtttcaagcaatttggcaaagc

SEQ ID NO: 669 - protein, 461 aa, Arabidopsis thaliana
  misc_feature (91)..(456): Pfam Name: Aminotran_1_2 Pfam Description: Aminotransferase class I and II
  misc_feature: Ceres Clone ID no. 38404
  misc_feature: Bit score of 1204.4 for HMM based on sequences of Figure 5
  misc_feature: Functional Homolog Of SEQ ID NO. 645
MSSTHQLVSSMISSSSSTFLAPSNFNLRTRNACLPMAKRVNTCKCVATPQEKIEYKTKVSRNSNMSKLQAGYLFPEIARRRSAHLLKYPDAQVISLGIGDTTEPIPEVITSAMAKKAHELSTIEGYSGYGAEQGAKPLRAAIAKTFYGGLGIGDDDVFVSDGAKCDISRLQVMFGSNVTIAVQDPSYPAYVDSSVIMGQTGQFNTDVQKYGNIEYMRCTPENGFFPDLSTVGGTDIIFFCSPNNPTGAAATREQLTQLVEFAKKNGSIIVYDSAYAMYMSDDNPRSIFEIPGAEEVAMETASFSKYAGFTGVRLGWTVIPKKLLYSDGFPVAKDFNRIICTCFNGASNISQAGALACLTPEGLEAMHKVIGFYKENTNIIIDTFTSLGYDVYGGKNAPYVWVHFPNQSSWDVFAEILEKTHVVTTPGSGFGPGGEGFVRVSAFGHRENILEACRRFKQLYK

SEQ ID NO: 670 - protein, 426 aa, Arabidopsis thaliana
  misc_feature (56)..(421): Pfam Name: Aminotran_1_2 Pfam Description: Aminotransferase class I and II
  misc_feature: Public GI ID no. 3549670
  misc_feature: Bit score of 1114.7 for HMM based on sequences of Figure 5
  misc_feature: Functional Homolog Of SEQ ID NO. 645
MAKRVNTCKCVATPQEKIEYKTKVSRNSNMSKLQAGYLFPEIARRRSAHLLKYPDAQVISLGIGDTTEPIPEVITSAMAKKAHELSTIEGYSGYGAEQGAKPLRAAIAKTFYGGLGIGDDDVFVSDGAKCDISRLQVMFGSNVTIAVQDPSYPAYVDSSVIMGQTGQFNTDVQKYGNIEYMRCTPENGFFPDLSTVGRTDIIFFCSPNNPTGAAATREQLTQLVEFAKKNGSIIVYDSAYAMYMSDDNPRSIFEIPGAEEVAMETASFSKYAGFTGVRLGWTVIPKKLLYSDGFPVAKDFNRIICTCFNGASNISQAGALACLTPEGLEAMHKVIGFYKENTNIIIDTFTSLGYDVYGGKNAPYVWVHFPNQSSWDVFAEILEKTHVVTTPGSGFGPGGEGFVRVSAFGHRENILEACRRFKQLYK

SEQ ID NO: 671 - protein, 464 aa, Oryza sativa subsp. japonica
  misc_feature (94)..(459): Pfam Name: Aminotran_1_2 Pfam Description: Aminotransferase class I and II
  misc_feature: Public GI ID no. 37703720
  misc_feature: Bit score of 1198.2 for HMM based on sequences of Figure 5
  misc_feature: Functional Homolog Of SEQ ID NO. 645
MAASPAAAAAAATVSSFVSPSSFSSVKASKPDRLRPARRAAAVNVRCVSSPPATETSFKTKVPRNANMAKLQAGYLFPEIARRRAAHLLKFPDAKIISLGIGDTTEPIPDVITNAMAERAHALSTVDGYSGYGAEQGEKKLRAAIAATYYADLGIEETDIFVSDGAKCDISRLQVLFGSNVKIAVQDPSYPAYVDSSVIMGQTGLYQEDVQKYGNIEYMKCSPENGFFPDLSSVPRTDIIFFCSPNNPTGAAASRDQLTKLVKFAKDNGSIIVYDSAYAMYISDDSPKSIFEIPGAKEVAIETASFSKYAGFTGVRLGWTVVPKELLFSDGHPVAKDFNRIVCTCFNGASNISQAGGLGCLSPEGLKAMSDVVGFYKENTKIIVDTFTSLGFNVYGAKNAPYVWVHFPGRNSWDVFAEILEKAHVVTTPGSGFGPGGEGFVRVSAFGHRENIIEAARRLKQLYK

SEQ ID NO: 672 - protein, 432 aa, Arabidopsis thaliana
  misc_feature (56)..(421): Pfam Name: Aminotran_1_2 Pfam Description: Aminotransferase class I and II
  misc_feature: Public GI ID no. 152149571
  misc_feature: Bit score of 1077.2 for HMM based on sequences of Figure 5
  misc_feature: Functional Homolog Of SEQ ID NO. 645
  misc_feature (30)..(30): Xaa is any aa, unknown, or other
  misc_feature (78)..(78): Xaa is any aa, unknown, or other
  misc_feature (138)..(138): Xaa is any aa, unknown, or other
  misc_feature (162)..(162): Xaa is any aa, unknown, or other
  misc_feature (181)..(181): Xaa is any aa, unknown, or other
  misc_feature (242)..(242): Xaa is any aa, unknown, or other
  misc_feature (244)..(244): Xaa is any aa, unknown, or other
  misc_feature (263)..(263): Xaa is any aa, unknown, or other
  misc_feature (331)..(331): Xaa is any aa, unknown, or other
MAKRVNTCKCVATPQEKIEYKTKVSRNSNXSKLQAGYLFPEIARRRSAHLLKYPDAQVISLGIGDTTEPIPEVITSAXAKKAHELSTIEGYSGYGAEQGAKPLRAAIAKTFYGGLGIGDDDVFVSDGAKCDISRLQVXFGSNVTIAVQDPSYPAYVDSSVIXGQTGQFNTDVQKYGNIEYXRCTPENGFFPDLSTVGRTDIIFFCSPNNPTGAAATREQLTQLVEFAKKNGSIIVYDSAYAXYXSDDNPRSIFEIPGAEEVAXETASFSKYAGFTGVRLGWTVIPKKLLYSDGFPVAKDFNRIICTCFNGASNISQAGALACLTPEGLEAXHKVIGFYKENTNIIIDTFTSLGYDVYGGKNAPYVWVHFPNQSSWDVFAEILEKTHVVTTPGSGFGPGGEGFVRVSAFGHRENILEACRRFKQLYKHHHHHH

SEQ ID NO: 673 - protein, 439 aa, Oryza sativa subsp. japonica
  misc_feature (69)..(434): Pfam Name: Aminotran_1_2 Pfam Description: Aminotransferase class I and II
  misc_feature: Public GI ID no. 125603687
  misc_feature: Bit score of 1136.6 for HMM based on sequences of Figure 5
  misc_feature: Functional Homolog Of SEQ ID NO. 645
MAASPAAGAAAATVSSFVSPSSFSSVNFRFEAFKTKVPRNANMAKLQAGYLFPEIARRRAAHLLKFPDAKIISLGIGDTTEPIPDVITNAMAKRAHALSTVDGYSGYGAEQGEKKLRAAIAATYYADLGIEETDIFVSDGAKCDISRLQVLFGSNVKIAVQDPSYPAYVDSSVIMGQTGLYQEDVQKYGNIEYMKCSPENGFFPDLSSVPRTDIIFFCSPNNPTGAAASRDQLTKLVKFAKDNGSIIVYDSAYAMYISDDSPKSIFEIPGAKEVAIETASFSKYAGFTGVRLGWTVVPKELLFSDGHPVAKDFNRIVCTCFNGASNISQAGGLGCLSPEGLKAMSDVVGFYKENTKIIVDTFTSLGFNVYGAKNAPYVWVHFPGRNSWDVFAEILEKAHVVTTPGSGFGPGGEGFVRVSAFGHRENIIEAARRLKQLYK

SEQ ID NO: 674 - protein, 397 aa, Oryza sativa subsp. japonica
  misc_feature (27)..(392): Pfam Name: Aminotran_1_2 Pfam Description: Aminotransferase class I and II
  misc_feature: Public GI ID no. 108707679
  misc_feature: Bit score of 1033.3 for HMM based on sequences of Figure 5
  misc_feature: Functional Homolog Of SEQ ID NO. 645
MAKLQAGYLFPEIARRRAAHLLKFPDAKIISLGIGDTTEPIPDVITNAMAKRAHALSTVDGYSGYGAEQGEKKLRAAIAATYYADLGIEETDIFVSDGAKCDISRLQVLFGSNVKIAVQDPSYPAYVDSSVIMGQTGLYQEDVQKYGNIEYMKCSPENGFFPDLSSVPRTDIIFFCSPNNPTGAAASRDQLTKLVKFAKDNGSIIVYDSAYAMYISDDSPKSIFEIPGAKEVAIETASFSKYAGFTGVRLGWTVVPKELLFSDGHPVAKDFNRIVCTCFNGASNISQAGGLGCLSPEGLKAMSDVVGFYKENTKIIVDTFTSLGFNVYGAKNAPYVWVHFPGRNSWDVFAEILEKAHVVTTPGSGFGPGGEGFVRVSAFGHRENIIEAARRLKQLYK

SEQ ID NO: 675 - protein, 419 aa, Vitis vinifera
  misc_feature (49)..(414): Pfam Name: Aminotran_1_2 Pfam Description: Aminotransferase class I and II
  misc_feature: Public GI ID no. 157352390
  misc_feature: Bit score of 830.2 for HMM based on sequences of Figure 5
  misc_feature: Functional Homolog Of SEQ ID NO. 645
MSATAKCMQMAGVCTRVTRNLNMEKLRNGYLFPEIAMRELEHMKKYPNAKVISLGIGDTTEPIPDIVTSSMANHARRLSTVEGYRGYGAEQGNKALRKAIAETLYGDLPIKDTEIFVSDGSQCDISRLQLLLGSNVTIAVQDPTFPAYIDSSVIIGQTGDFQDETGKYQNIKYMPCRPQNNFFPDLTTTATTDVIFICSPNNPTGHAASRKQLEQLVEFARANRSIIIFDSAYAAYVTDESPRSIFEIPGAREVAIEISSFSKFAGFTGVRLGWTVVPDELLFSNGFPVIKDYNRIVCTCFNGASSIAQAGGLACLSSDGLMVMQSVVDYYKENAKILGDTFTSLGLDVYGGINAPYAWVHFPGMKSWDVFTELLEKTHIITVPGCGFGPGGEEHIRVSAFGHRECILEASRRLKSLLS

SEQ ID NO: 676 - protein, 441 aa, Chlamydomonas reinhardtii
  misc_feature (69)..(433): Pfam Name: Aminotran_1_2 Pfam Description: Aminotransferase class I and II
  misc_feature: Public GI ID no. 159469820
  misc_feature: Bit score of 829.9 for HMM based on sequences of Figure 5
  misc_feature: Functional Homolog Of SEQ ID NO. 645
MQLNVRSTASGARSSTRSRRMTAVVQAVAQRAGTIDVQRNENFGKLRAGYLFPEIARRRKAHQEKNPDAKIISLGIGDTTEPLPKYIADAMAKAAAGLATREGYSGYGAEQGQGALREAVASTFYGHAGRAADEIFISDGSKCDIARIQMMFGSKPTVAVQDPSYPVYVDTSVMMGMTGDHNGTGFDGIEYMVCNPDNHFFPDLSKAKRTDIIFFCSPNNPTGAAATRAQLTELVNFARKNGSILVYDAAYALYISNPDCPKTIYEIPGADEVAIETCSFSKYAGFTGVRLGWTVVPKALKYANGEPVHADWNRVMTTCFNGASNIVQAGGLACLQPEGLKEMNAMIKFYKENAQILKTTFTEMGFSVYGGDDAPYIWVGFPGKPSWDVFAEILERCNIVTTPGSGFGPAGEGFVRASAFGSRENILEAVRRFKEAYGKRN

SEQ ID NO: 677 - protein, 402 aa, Ostreococcus lucimarinus CCE9901
  misc_feature (27)..(396): Pfam Name: Aminotran_1_2 Pfam Description: Aminotransferase class I and II
  misc_feature: Public GI ID no. 145344081
  misc_feature: Bit score of 639.3 for HMM based on sequences of Figure 5
  misc_feature: Functional Homolog Of SEQ ID NO. 645
MAQLKAGYLFPEIARIRNAHLEKNPDAKIISLGIGDTTEPIPKPITDGMVAAAAALGTKEGYSAKGGYGPEAGQMELRKTIAEKLYKGTPITYEDVFASDGSKCDISRMLQMFGSGRKIAVQDPSYPAYVDSSVIMGHSTGFNDAVKQYENITYMPCGAENDFFPDLSAAKSAELIFFCSPNNPTGAAATRAQLTELVNQALESGSIIIYDAAYSAFVGNPDCPKTIYEIPGAEKCAIETCSFSKYAGFTGLRLGWTVFPEALKFSDGSSVRQDWTRMMGTSFNGASTVAQGAGLACLTDAGLAAMGDMVAFYKENAAILKRTWEEMGYKVYGGTDAPYVWVSFEGRDSWEVFTEILDKTDIVTTPGAGFGPAGNGYVRCSAFGSRENINEAARRLKESFSK

SEQ ID NO: 678 - DNA, 708 bp, Oryza sativa subsp. japonica
  misc_feature: Antisense of Os01g58420 relative to construct 5' to 3'
ctagttctctaccggcggcggccggttcagatccagatcgaaagctgccgccttgttcgccgtaaccgctggaggtgacggcgcgagatcaaccaccgacgaggagtcggagtcactttgtgcaaccgccgccacggtgaccggcggtgcaagcttcatcatacggtatccagcctcagctgcggcagccgctgcagcctgctcatagaaaaagtaaggatgcgttgctggacgtgcaacgggatatcctctgaaaggaaagcgaacgccggtgccggcgactgcagtcacagcagccgcgcggtggaacaaatccaagtccagagtcggcggcagaggcatggcccgcataggcgtctgaaccccgccgccaccggtgtctaccgtgctattgctgctggggctgccgccacagccgaccatcgactgtgatgcaaacggaaagtttgtttttgccttggcaccccggaactctcgagcggcggcgtcgtaggcgcgggcggcctcctctgccgtgtcgtaggtaccgagccacacccggctcttcttggcagggtcacggatctccgctgcgtaacgcccccacgggcgcttgcggacgcccctgtagtgaggacccccggctccgacacctccgccgacgccaagaccaagcccggtgggtggcgccacagcaaccttctccaccgtagctgctctgggcgccat

SEQ ID NO: 679 - DNA, 495 bp, Arabidopsis thaliana
  misc_feature: Ceres Annot ID no. 832857
  misc_feature: Ceres Locus ID no. AT1G16910
  misc_feature: Encodes the peptide sequence at SEQ ID NO. 243
atgacgagtacaaacacgagaaacaaaggcaaatgcatagtagaaggaccaccaccgactctaagccgttatgagtcacaaaaaagccgcgactggaacacgttttgccagtatctcatgaccaagatgccaccagttcacgtatgggagtgtgaatcaaaccacatcctcgatttcctccaaagtcgtgaccagtttggtaaaacaaaagttcatatccaaggatgcgttttcttcggacagaaagagccaccaggagagtgtaactgcccgttgaaacaggcgtggggaagcttagatgctttgatcggacggctgagagcagcttacgaggagaacggtggcttaacggagaaaaacccgtttgcccggggagggattaggatttttctgagggaagtgagaggttcacaggcgaaggcgagaggagttttgtacaaaaaaaagaagcgtcttgtagttgttggtacgggaactagtactacttggacttaa

SEQ ID NO: 680 - DNA, 1003 bp, Arabidopsis thaliana
  misc_feature: Ceres Annot ID no. 870022
  misc_feature: Ceres Locus ID no. AT1G78815
  misc_feature: Encodes the peptide sequence at SEQ ID NO. 244
aagaccaaaagaaaaaaaaaaactttttcttttctgatgaatcgtatctattagctatgagcctgaggtgatgatcatgtcaacataaccatcaacgttctaccatggctagtcatagcaacaaaggcaaaggcatagcagaaggatcgtctcaaccgcaatcgcaaccgcaaccacaaccacaccaaccgcaatcacctcctaacccgccagcgttaagccggtacgagtcacagaaacgacgagactggaacacgttttgtcaatacctgcgtaaccaacagccaccggttcacatctcgcagtgtggatcaaaccacatcctcgatttcctccaatatctcgaccagtttgggaagacaaaggttcatatccatggatgcgttttcttcggacaggttgagccagcgggacagtgtaactgtcctttaaaacaagcgtgggggagtttagatgctttgatcggacggctaagagcggctttcgaggagaacggaggattgccggagagaaacccttttgccggcggcggaattagggtttttctgagggaagtgagagattcacaggcgaaggcaagaggagttccgtacaagaaaagaaaaaagaggaagaagaggaatcctatgaagagtcatgatggtgaagatggtactacgggaactagtagtagctccaacttggcttcttagcggaagcaaacaaaaaatctataataaaacaaagtggaattagttaatggtaagcatttaatactctccataatctctattaattttcagtactttaatcctattttgtgatctatttacaattttacatatagagtgaaaagaaacaattctacattcgtttcttgatagtcagctcttaatgcatagttgaattttatacgtatcatacccaaactataagattaatcttgatcttagatcatatacatatatcatcatggtgtgtaccctaagtttcataatcatttttcttaactatttatgtggat

SEQ ID NO: 681 - DNA, 660 bp, Arabidopsis thaliana
  misc_feature: Ceres Annot ID no. 828846
  misc_feature: Ceres Locus ID no. AT2G31160
  misc_feature: Encodes the peptide sequence at SEQ ID NO. 245
atggatatgattccccaattgatggaaggctcttcagcttacggaggtgtcacaaacctcaacatcatctcaaacaactcctcctccgtcaccggagccaccggaggtgaagcaacgcaaccactgtcttcctcctcctcaccatcggcgaactcaagccgttacgagaaccagaagaggagagactggaacacgttcggacagtacttaaggaaccatcggccaccgctttcgctttcccgatgcagtggagctcacgtgctcgagttcctccgttacttggaccagttcggtaagacaaaagtccacacgaacatttgtcacttctatggccatcctaatcctccggcaccgtgtccgtgtcctctccgacaagcttggggaagtcttgacgctcttatcggtcgtcttcgagctgcctttgaggaaaacggaggcaagcctgagacgaatccttttggagctcgtgccgttaggctttatctaagggaagttagagatatgcagagtaaagctagaggtgttagctacgagaagaagaagcgaaagcgtcctcttccttcgtcgtcgacttcttcttcctccgccgtagctagccaccagcaatttcaaatgctaccgggtactagttctactactcaattaaagtttgagaagtaa

SEQ ID NO: 682 - DNA, 907 bp, Arabidopsis thaliana
  misc_feature: Ceres Annot ID no. 861920
  misc_feature: Ceres Locus ID no. AT2G42610
  misc_feature: Encodes the peptide sequence at SEQ ID NO. 246
attacataattcttcagatccataaaacaaattgatcccttaaccttcttcaccaacatctctcttacactcaacaagagatcatatcatgtcctctccaagagaaagaggaaagagtttgatggaatcatcaggatcagagccaccggtgacaccaagccgttacgagtcgcagaagagacgtgactggaacactttcggacagtacttgaagaatcagagaccgcctgtgccgatgtctcactgcagctgtaaccacgtgcttgatttcctcaggtacttagaccagttcggtaagacaaaggtgcacgtgcctggctgtatgttctacggccagcctgagccaccagctccttgcacgtgccctctcagacaagcttggggaagtcttgacgctttgatcggacggctgagagcggcttacgaggagaacggtggacctccggagactaaccctttcgctagcggagcgataagggtttatctgagggaggttagggagtgtcaggctaaggctagagggattccttacaagaagaagaagaagaagaagccaacgccggagatgggaggtgggagagaggactcttcttcctcctcctcttccttcagcttctcttaagagattctccatcgtcgtgaaagactttgtggatcagtaagtctcaaagagggatcaaatgtaaaagagacctcaaatctatctactggtatcttcaacatatctttcgggaccatttttgcagctcttcgtcccctcctcttcatttccgcagatctccgtcgtcataaatatcttcatctattctcttattaagctctattcatatttattctcttattaagcacttttcttttgaataaagtaagtgtaaagagtttatatattgaattcaggtgtgttttg

SEQ ID NO: 683 - DNA, 606 bp, Arabidopsis thaliana
  misc_feature: Ceres Annot ID no. 839537
  misc_feature: Ceres Locus ID no. AT3G04510
  misc_feature: Encodes the peptide sequence at SEQ ID NO. 247
atggatttgatctctcaaaaccacaacaacagaaaccctaataccagtctctcgacgcaaaccccttcttccttttcttctccaccttcctctagccgctacgagaaccagaaacgccgtgactggaacactttctgccaatacctcagaaaccaccatccaccgctctctctagcttcttgcagtggcgcacacgtcctcgattttctgcgttaccttgaccaattcggcaaaaccaaagtccaccaccaaaactgcgccttctttggcctcccaaatccaccggctccttgtccttgtcctctccgacaagcctggggctcactcgacgccctcattggtcgtctccgtgcagcctacgaggagaacggtggcgctcccgagactagcccttttggctcacggtccgtcaggattttcctcagggaggttagagatttccaggctaagtcacgtggtgttagctatgagaagaagaggaaaagggtcaacaacaagcaaataactcagtcccaaccacagtcccaaccgcctttaccccagcagccacagcaggagcaaggtcagtctatgatggctaattaccaccacggtgcaactcaataa

SEQ ID NO: 684 - DNA, 588 bp, Arabidopsis thaliana
  misc_feature: Ceres Annot ID no. 8755109
  misc_feature: Ceres Locus ID no. AT3G23290
  misc_feature: Encodes the peptide sequence at SEQ ID NO. 248
atggatcatatcatcggctttatgggcacaacaaacatgtcacataacacaaaccttatgatcgctgccgcagccactaccactacgacctcttcgtcttcctcttcgtcctccggaggctcggggactaaccagctaagcaggtacgagaatcagaagagaagagattggaacactttcggacagtatctacgcaatcaccgtccaccactttctctctcccgttgcagtggtgctcatgttcttgaattcctcaggtacctcgaccaattcggcaagactaaggttcacacacacctatgtccgttcttcggacacccaaacccaccagcaccatgtgcctgtccactccgacaagcgtggggtagtctggacgcactcattggccgtcttagagctgcttttgaagagaacggtggttcaccagagacgaacccttttggtgcacgagccgttcgactctacctaagggaagtacgtgactcgcaggctaaagcacgtgggatcagctatgaaaaaaagaagcgcaagcgacctcctccgccactaccaccggctcagccggcgatttcaagtagccctaattaa

SEQ ID NO: 685 - DNA, 573 bp, Arabidopsis thaliana
  misc_feature: Ceres Annot ID no. 853637
  misc_feature: Ceres Locus ID no. AT5G28490
  misc_feature: Encodes the peptide sequence at SEQ ID NO. 249
atggatttgatctctcaccaaccaaacaagaaccctaattcctcaacacaactaacaccaccttcctcaagccggtacgagaaccaaaaacgccgtgactggaacactttctgtcaatacctccggaaccaccgtcctccgctctctctcccctcgtgtagcggcgcacacgtgctcgagttcctccgctaccttgaccagttcgggaaaacaaaagttcaccaccagaactgtgccttctttggcctccctaaccctcctgctccttgtccttgtcctctccggcaagcttggggctcactcgacgctcttatcggccgcctccgcgccgcctacgaggagaacggtggcccacctgaagctaacccatttggctcacgcgccgtcaggttattcctccgtgaagtcagagactttcaagccaaagctcgaggtgttagctatgagaagaagaggaagagagtcaacaggcagaaaccgcaaacgcagccgcctctacagcttcagcaacagcaacagcagccacaacaaggtcagtctatgatggctaattactcgggtgcaacagtatga

SEQ ID NO: 686 - DNA, 549 bp, Arabidopsis thaliana
  misc_feature: Ceres Annot ID no. 856813
  misc_feature: Ceres Locus ID no. AT5G58500
  misc_feature: Encodes the peptide sequence at SEQ ID NO. 250
atggagggagaaaccgcagccaaagcagcggcaagttcctcctcatccccgagccggtacgagtctcaaaagaggcgagactggaacactttccttcagtatctaaggaaccacaagccacctctgaatctgtctcgttgtagtggcgcacacgtccttgagttccttaagtacctcgaccagtttggtaagaccaaagtccatgccacggcttgtcccttcttcggacaacctaacccaccgtctcagtgcacttgccctctcaagcaagcttggggaagtctcgatgctctcatcggccgtctaagggctgctttcgaggaaatcggcggtggtcttcctgagtcaaaccctttcgctgccaaggctgttaggatctatcttaaagaagtccgtcaaacacaggctaaggctcgagggattccttacgacaagaagaaaagaaaacgtccgcatacagacacggcaactccaatcgccggtgacggagacgatgccgaaggaagtggtggtgctgctttggtcgttacggctgcaactacggtatag

SEQ ID NO: 687 - DNA, 815 bp, Arabidopsis thaliana
  misc_feature: Ceres Clone ID no. 28780
  misc_feature: Ceres Locus ID no. AT1G07090
  misc_feature: Encodes the peptide sequence at SEQ ID NO. 251
aactactaaacactaaattatcaatccgctctcttctcaaaaaaaaaaaatcgactctaaaatcaaactctctcaaagctccccaaaaaaaccctagttctgaatggaatcggcggattccggacgatccgatccggtaaaaggagacgacccgggtccatctttcgtctcttcaccaccagctacacctagcaggtatgagtcacagaagcgacgcgactggaacacgttcttgcagtacctcaagaaccacaagccgcctctcgcgttgtcacggtgtagcggagcgcatgtgatcgagtttctcaagtacctcgaccagttcggtaagaccaaagtccacgtggcggcttgtccttacttcggccatcagcaacctccgtctccttgctcatgccctctcaagcaagcttggggatctctcgatgctttgatcggacggttgagagctgcctacgaggagaacggtggacggccggattctaacccgttcgccgcacgtgcggttcggatttacttgagggaagtcagagagagtcaggcaaaggctcgtgggattccttacgagaaaaagaaacggaaacggccgccaactgtcaccaccgttagagttgacgtcgcttcttcgagacaaagtgacggagacccttgtaacgtcggtgctccatctgttgccgaggccgtaccgccttagatcgaattatatataatattatagttttcttgattaatgatatatatatacttatctctatgtatgtatggaactcacttcatcttttgttccttagtacctaattattaaattttgttcc

SEQ ID NO: 688 - DNA, 1470 bp, Populus balsamifera
  misc_feature: Ceres Annot ID no. 1461228
  misc_feature: Encodes the peptide sequence at SEQ ID NO. 689
atgtcgccgacgcaacttttatcgacttcgatttcttcttcttcctctgcttttttagccgcacctattgccttcaaagctagaaaccagaatgtttcgatcgcgtcgaaaacgccttctatttgcacgtgtgctgctgctcctcaagaacagaaaaccgtttacaaaacacaagtctcccgcaatgcaaatattgcaaagcttcaagctggttacttatttccagaggttgctcgaaggaggaatgcgcacatgctgaaataccctgatgcaaaagtgataagccttggaattggtgacactacagaacctatcccagaagttataacttctgcaatagcaaagagagcagaagcactgtctactttggagggttacagtggttatggacctgaacaaggtgaaaaacctttgagaactgcaattgcttcaacattttattcaggtcttgggatcgaggaggatgatatatttgtctctgatggtgccaaatgtgacatatctcgcctccagatggtatttggggcaaatgtaaccatggcagtgcaagatccatcatacccggcttacgttgattctagtgtcatcatgggccagactggacagtttcagaaagacgttgagaagtacggtaagattgaatacatgaggtgcactccagagaatggttttttccctgatttatccaaagtttctcgaacggatatcatatttttctgttcaccgaacaatcctactggttctgctgcaacaagggagcaactgacccaactagtacaatttgcaaaggacaatggatcaatcatcgtctatgattcagcatatgccatgtatatgtctgatgataacccacgatccatatttgaaattccgggagccaaagaggttgctttggagacatcatcttttagtaagtatgctgggtttactggagttcgtctggggtggactgttgttccaaaacagcttctatattctgatgggttcccagttgtaaaggatttcaaccgtgttgtttgcactagctttaatggggcatccaacatttgccaagctggtggtcgggcttgcctttcacctgaaggccttaaggcaatgagtgaggtgattggattctataaagaaaactccaacattataatggatacattcaattcgctcggttttaatgtatatggaggaaagaatgctccctatgtgtgggttcacttccctggccaaagctcgtgggatgttttcagtgaaattcttgagaaaactcatgtagttaccacacctgggagtggttttggacctggtggggaagtttggttagaccaccaaggcagaatattttctgaaaaaacagcaagcccgctcacaacaagctcggactctcgaaaggacaagatctccataaagcagggggagcaaccaagacagccttccagcgatgttagcaatgcaaatctttacacatcaagttggtaa

SEQ ID NO: 689 - protein, 429 aa, Populus balsamifera
  misc_feature (91)..(464): Pfam Name: Aminotran_1_2 Pfam Description: Aminotransferase class I and II
  misc_feature: Ceres Annot ID no. 1461228
  misc_feature: Bit score of 1109.0 for HMM based on sequences of Figure 5
  misc_feature: Functional Homolog Of SEQ ID NO. 645
RNANIAKLQAGYLFPEVARRRNAHMLKYPDAKVISLGIGDTTEPIPEVITSAIAKRAEALSTLEGYSGYGPEQGEKPLRTAIASTFYSGLGIEEDDIFVSDGAKCDISRLQMVFGANVTMAVQDPSYPAYVDSSVIMGQTGQFQKDVEKYGKIEYMRCTPENGFFPDLSKVSRTDIIFFCSPNNPTGSAATREQLTQLVQFAKDNGSIIVYDSAYAMYMSDDNPRSIFEIPGAKEVALETSSFSKYAGFTGVRLGWTVVPKQLLYSDGFPVVKDFNRVVCTSFNGASNICQAGGRACLSPEGLKAMSEVIGFYKENSNIIMDTFNSLGFNVYGGKNAPYVWVHFPGQSSWDVFSEILEKTHVVTTPGSGFGPGGEVWLDHQGRIFSEKTASPLTTSSDSRKDKISIKQGEQPRQPSSDVSNANLYTSSW

SEQ ID NO: 690 - DNA, 819 bp, Arabidopsis thaliana
  misc_feature: Ceres Annot ID no. 827940
  misc_feature: Encodes the peptide sequence at SEQ ID NO. 691
atgtatgaaaacgggataagctttataatctctttacttatatgtggatgtgtgaagagtgaggagatgatgaagcaacatttcgtgctagtacatggttcgtgcctcggcgcgtggtgctggtacaaggtgaagccgctgctcgaggcttcgggccatcgtgtaaccgccttagacctagctgcttgtggtatagacacaaggtcgatcactgacatttccacatgcgaacaatattctgagccgttgattcagctaatgacttcattgccgaatgatgagaaggttgtgctcgtgggtcatagctatggaggtttgactttagccatagccatggataagtttcccgacaaaatctctgtctctgtcttcgtaacttctttcatgcccgacaccaaaaactcaccatcgttcgtcctggaaaagtttgcaagcaccatgacaccagaagattggatgggctctgagctcgagccgtatgtggtcttcagcgctgagttcacgaagcaccgtatcctccaactttctcctattgaagatcttgagcttagattgcttctaaagaggcctggttcattatttcttaatgatttatcgaggatgaagaacttttctgaaaaagggtatggatctgttcctcgagcttacattgtgagcaaagatgaccacaccatctcggaagaatatcaacgatggatgatcgataactatccgccgaatttagtgatagagatggaagggacggatcatttgccattgttttgcaaacctcaactactaagtgaccatctattggcaatcgccgacaaattctcttaa

SEQ ID NO: 691 - protein, 272 aa, Arabidopsis thaliana; identical to SEQ ID NO: 610
  misc_feature (53)..(266): Pfam Name: Abhydrolase_1 Pfam Description: alpha/beta hydrolase fold
  misc_feature: Ceres Annot ID no. 827940
  misc_feature: Bit score of 566.2 for HMM based on sequences of Figure 8
  misc_feature: Functional Homolog Of SEQ ID NO. 595

SEQ ID NO: 692 - DNA, 1743 bp, Sorghum bicolor; identical to SEQ ID NO: 535
  misc_feature: Ceres Annot ID no. 6086224
  misc_feature: Encodes the peptide sequence at SEQ ID NO. 693

SEQ ID NO: 693 - protein, 520 aa, Sorghum bicolor
  misc_feature (103)..(499): Pfam Name: PTR2 Pfam Description: POT family
  misc_feature: Ceres Annot ID no. 6086224
  misc_feature: Bit score of 1335.6 for HMM based on sequences of Figure 11
  misc_feature: Functional Homolog Of SEQ ID NO. 426
VFLRRVLHQGNAEAANNISKWTGTVYIFSLIGAFLSDSYWGRYVTCAIFQIIYVTGLVILSLASWFLLVKPSGCGGVKVHCDEPSAPGVALFYLSTYMIAFGNGGYQPSIATFGSDQFDETDPKEGRSKVAFFSYFYLALNVGSLFSNTVLVYYEDSGRWVMGFWVSAAAAALALVLFLLGTPNYRHFKPSGNPLTRVAQVFVAAFRKWHAEVPRGELLHEVEGEDPKISGIRKILHSDELRFLDKAATITEGEKMENPWRLCTVTQVEEVKCILKMLPIWLCTIVYSVVFTQMASLFVEQGATMDTNIGSFHFPAASMSLFDVLSVLAFIAIYRRVLVPVMARLSGNPQGLTELQRMGVGLVIGMAAMVVAGVVEVERLKRVAAPDQPSSLSVLWQVPQYALIGASEVFMYVGQLEFFNGQAPDGVKSFGSALCMASISLGNYVSIMLVSVVTSLTAGEKRPGWIPGNLNSGHLDRFYFLLAALSLVDLAVYIACAMWYKGIKLDGGDGDDSRKVSAHV

SEQ ID NO: 694 - DNA, 1374 bp, Glycine max
  misc_feature: Ceres Clone ID no. 476769
  misc_feature: Encodes the peptide sequence at SEQ ID NO. 695
agatcaatttgacgagaagaacgaaaaacaaaagaacgcgagagaagctttcttctcttatttttactttgccctcaatgttggatctctgttctccaacactatattagtatactacgaggattcaggaatgtggacaatgggtttcttggtgtccttggcctcagctgttattgccttagtttcatacttagcaggatatcgaaaatatagatatgtaaagggatatgggaatccggtgataagggtagttcaggtgtttgtggccactgttagaaagtggaaggttggtccagccaaggaactccaactttatgaggttgatggtccagaatctgccataaaagggagtagaaagattcatcacagcaatgattttagattcatggacaaggcagcaacaataacggagaaagatgcagttaatctcaagaatcactggcggctatgtactgtaactcaagttgaggaagccaaatgcgtactgagaatgctaccagtttggctatgtactataatttattcagttgtgtttacgcaaatggcttctctttttgtcgagcaaggggatgtgatgaacaacaagataggaaattttcacttgccagcagccagcatgtcagtgtttgatatctgcagtgtccttttatgcactggaatttatcgccaaatccttgttcctctagcaggaagatttagtggcaatcctaggggactaactgagcttcaaagaatgggagttggcctaattattggaatgttagctattcttgcagctggtgccacagagtttgaaaggctcaaacacattacacccggggaaaaggctagttctttgagtatattttggcaaatcccacagtatgttctagttggtgcttcagaagttttcatgtatgtgggtcaactggagttctttaatgggcaagccccagatggcataaaaagctttgggagctcactttgcatggcttcaatttctcttggaaactatgtgagtagcttgctggtgtacatggtgatgggaatcactgcaagaggcgagaatccgggatggattcccaataacttgaatgtggggcacatggataggtttttcttcctcgttgcagtgctaactgctcttgattttgtactctacttattatgtgctcgctggtacaagagcatcaaccttggagatggtgacatgggaagccaagaggacgaggaagtgatcagtaaagtttgattcagttgttttgaattttcatttccttgctaggaatttgtttatcttagtagttttaataaggctgttcaaggatgtcccttttggtgacacaaagcatgaccagttcaattgagagaggattgacaaaatattggtgggat

SEQ ID NO: 695 - protein, 366 aa, Glycine max
  misc_feature (1)..(283): Pfam Name: PTR2 Pfam Description: POT family
  misc_feature: Ceres Clone ID no. 476769
  misc_feature: Bit score of 498.5 for HMM based on sequences of Figure 11
  misc_feature: Functional Homolog Of SEQ ID NO. 426
MWTMGFLVSLASAVIALVSYLAGYRKYRYVKGYGNPVIRVVQVFVATVRKWKVGPAKELQLYEVDGPESAIKGSRKIHHSNDFRFMDKAATITEKDAVNLKNHWRLCTVTQVEEAKCVLRMLPVWLCTIIYSVVFTQMASLFVEQGDVMNNKIGNFHLPAASMSVFDICSVLLCTGIYRQILVPLAGRFSGNPRGLTELQRMGVGLIIGMLAILAAGATEFERLKHITPGEKASSLSIFWQIPQYVLVGASEVFMYVGQLEFFNGQAPDGIKSFGSSLCMASISLGNYVSSLLVYMVMGITARGENPGWIPNNLNVGHMDRFFFLVAVLTALDFVLYLLCARWYKSINLGDGDMGSQEDEEVISKV

SEQ ID NO: 696 - DNA, 1654 bp, Arabidopsis thaliana
  misc_feature: Ceres Clone ID no. 15650
  misc_feature: Encodes the peptide sequence at SEQ ID NO. 697
attatagaatatctaataatgaagaatcggtttcaaaattaataatgactgattataattacattgacaacatgcagggactaataacaattacactcacagcatcgtttcctcaactccacccagcatcatgcaacagccaggacccactcagttgcggcggtccgaataagctccagatcggagttttgctattgggactctgtttcctctccgtagggagtggaggaatacgaccttgtagcatcccttttggggttgatcagtttgaccaacgaactgaggaaggggttaaaggagtggccagtttcttcaactggtattacatgactttcactgtggttctgatcattacgcagaccgtagttgtgtatatccaggatcaagtcagttggattatcggttttagtatccctaccggactcatggctcttgcggttgttatgttttttgccggaatgaagcgttatgtctacgttaaaccagaaggaagtatattctctgggatcgctcaagttatcgtggcagctcgtaagaagcgaaagctgaaacttccggcggaagatgacggcactgtcacctattacgacccagccatcaagtctagcgtgttatccaagttacaccgcagtaaccaattcaggtgtcttgacaaagccgcggtggttatagaaggtgacctaacacccgagggacctcccgcagacaagtggcggttatgcagcgtccaagaagtggaagaagtgaagtgtttgatccgaattgttcctatctggtcggccggaataatctcactcgcggccatgacaacacaaggcactttcacggtctctcaagctttgaaaatggatcgaaacttaggtcctaaattcgagattccggctggttcactctccgtcatctctctcctcacaatcggcatctttcttcccttctacgaccgcgtttttgtaccattcatgcggcgaatcaccggccataaatccggaatcacactcctccaaaggataggaacagggatcgttttcacgatcttttctatgatcgttgcgggcattgtggagcgtatgagacgcatacgctccatcaatgccggagatccaacgggaatgactccaatgtcggtgttttggctttcgccgcagctaattctcatgggactatgtgaagcattcaatatcatcggacaaattgagttcttcaacagtcagtttccagagcacatgagaagtatcgctaattctctcttctctttatcgttcgccggttcgagctaccttagtagtttccttgtgactgtcgttcataaattctccggtgggcatgatcgtccggattggctaaacaagaatctcaacgcgggaaaattggattacttctattatctgattgcggttttgggtgtggttaatctggtttacttttggtattgtgctcggggataccggtacaaggtcggtttaccgattgaagactttgaggaggacaagtcctccgatgatgttgagatgacttccaagaaatcgatggaatgatttaatagactatccttagggacaacaagaagattgtcgatgttgtttgaataattactatgacaatgtatgtatcataatatgtaagaactagaatatataataaatttttaccttcc

SEQ ID NO: 697 - protein, 496 aa, Arabidopsis thaliana
  misc_feature (13)..(406): Pfam Name: PTR2 Pfam Description: POT family
  misc_feature: Ceres Clone ID no. 15650
  misc_feature: Bit score of 341.4 for HMM based on sequences of Figure 11
  misc_feature: Functional Homolog Of SEQ ID NO. 426
MTDYNYIDNMQGLITITLTASFPQLHPASCNSQDPLSCGGPNKLQIGVLLLGLCFLSVGSGGIRPCSIPFGVDQFDQRTEEGVKGVASFFNWYYMTFTVVLIITQTVVVYIQDQVSWIIGFSIPTGLMALAVVMFFAGMKRYVYVKPEGSIFSGIAQVIVAARKKRKLKLPAEDDGTVTYYDPAIKSSVLSKLHRSNQFRCLDKAAVVIEGDLTPEGPPADKWRLCSVQEVEEVKCLIRIVPIWSAGIISLAAMTTQGTFTVSQALKMDRNLGPKFEIPAGSLSVISLLTIGIFLPFYDRVFVPFMRRITGHKSGITLLQRIGTGIVFTIFSMIVAGIVERMRRIRSINAGDPTGMTPMSVFWLSPQLILMGLCEAFNIIGQIEFFNSQFPEHMRSIANSLFSLSFAGSSYLSSFLVTVVHKFSGGHDRPDWLNKNLNAGKLDYFYYLIAVLGVVNLVYFWYCARGYRYKVGLPIEDFEEDKSSDDVEMTSKKSME

1.-17. (canceled)

18. A plant cell comprising an exogenous nucleic acid, said exogenous nucleic acid comprising a regulatory region operably linked to a nucleotide sequence encoding a polypeptide, wherein the HMM bit score of the amino acid sequence of said polypeptide is greater than about 65, said HMM based on the amino acid sequences depicted in one of FIGS. 1-11, and wherein said plant has a difference in the level of biomass as compared to the corresponding level of a control plant that does not comprise said nucleic acid.

19. A plant cell comprising an exogenous nucleic acid said exogenous nucleic acid comprising a regulatory region operably linked to a nucleotide sequence encoding a polypeptide having 80 percent or greater sequence identity to an amino acid sequence selected from the group consisting of SEQ ID NO: 1, 2, 4, 6, 8, 10, 11, 12, 13, 14, 15, 16, 17, 18, 20, 22, 24, 25, 27, 29, 30, 32, 33, 34, 36, 37, 38, 39, 40, 41, 43, 45, 47, 49, 50, 51, 53, 54, 56, 58, 59, 61, 63, 64, 66, 68, 70, 71, 72, 74, 75, 77, 79, 81, 82, 84, 86, 87, 88, 90, 92, 94, 96, 98, 100, 102, 104, 106, 108, 110, 112, 114, 115, 117, 118, 120, 121, 122, 123, 125, 127, 129, 131, 132, 133, 135, 137, 139, 141, 142, 144, 145, 146, 147, 149, 151, 152, 153, 154, 155, 156, 158, 160, 162, 163, 164, 166, 168, 169, 171, 173, 174, 176, 178, 180, 182, 184, 185, 186, 188, 189, 190, 191, 193, 194, 195, 196, 198, 200, 202, 203, 204, 206, 207, 209, 210, 212, 214, 216, 218, 220, 222, 224, 226, 228, 230, 232, 234, 236, 238, 239, 241, 242, 243, 244, 245, 246, 247, 248, 249, 250, 251, 253, 255, 257, 259, 261, 263, 264, 266, 268, 269, 271, 273, 275, 276, 278, 279, 281, 282, 283, 285, 287, 289, 291, 292, 294, 295, 296, 297, 298, 299, 300, 302, 304, 305, 306, 308, 310, 311, 312, 314, 315, 317, 319, 320, 321, 323, 324, 326, 327, 329, 331, 332, 334, 336, 337, 338, 340, 342, 343, 345, 347, 349, 351, 353, 354, 356, 357, 359, 361, 363, 365, 367, 369, 371, 372, 374, 376, 378, 380, 382, 384, 386, 388, 390, 391, 393, 395, 397, 399, 401, 403, 405, 406, 407, 409, 411, 413, 415, 416, 417, 418, 420, 421, 422, 424, 426, 428, 429, 430, 431, 433, 435, 436, 437, 438, 439, 440, 442, 444, 446, 447, 448, 449, 450, 452, 453, 454, 455, 456, 457, 459, 461, 463, 464, 466, 467, 468, 470, 472, 474, 476, 478, 479, 480, 482, 483, 484, 486, 488, 490, 492, 493, 495, 497, 499, 500, 501, 502, 503, 504, 506, 508, 509, 511, 513, 515, 516, 517, 518, 519, 521, 523, 525, 526, 528, 529, 531, 532, 534, 536, 537, 539, 540, 541, 543, 545, 547, 549, 550, 551, 552, 554, 556, 558, 560, 562, 563, 565, 567, 569, 571, 573, 574, 575, 577, 579, 581, 583, 585, 587, 589, 591, 593, 595, 597, 598, 600, 602, 603, 604, 605, 606, 608, 609, 610, 611, 613, 615, 616, 618, 619, 620, 622, 623, 625, 627, 629, 630, 632, 633, 634, 636, 637, 638, 639, 641, 642, 643, 645, 647, 649, 651, 652, 653, 655, 657, 659, 660, 662, 664, 666, 667, 669, 670, 671, 672, 673, 674, 675, 676, 677, 689, 691, 693, 695, and 697, wherein a plant produced from said plant cell has a difference in the level of biomass as compared to the corresponding level of a control plant that does not comprise said nucleic acid.

20. A plant cell comprising an exogenous nucleic acid said exogenous nucleic acid comprising a regulatory region operably linked to a nucleotide sequence having 80 percent or greater sequence identity to a nucleotide sequence selected from the group consisting of SEQ ID NO: 3, 5, 7, 9, 19, 21, 23, 26, 28, 31, 35, 42, 44, 46, 48, 52, 55, 57, 60, 62, 65, 67, 69, 73, 76, 78, 80, 83, 85, 89, 91, 93, 95, 97, 99, 101, 103, 105, 107, 109, 111, 113, 116, 119, 124, 126, 128, 130, 134, 136, 138, 140, 143, 148, 150, 157, 159, 161, 165, 167, 170, 172, 175, 177, 179, 181, 183, 187, 192, 197, 199, 201, 205, 208, 211, 213, 215, 217, 219, 221, 223, 225, 227, 229, 231, 233, 235, 237, 240, 252, 254, 256, 258, 260, 262, 265, 267, 270, 272, 274, 277, 280, 284, 286, 288, 290, 293, 301, 303, 307, 309, 313, 316, 318, 322, 325, 328, 330, 333, 335, 339, 341, 344, 346, 348, 350, 352, 355, 358, 360, 362, 364, 366, 368, 370, 373, 375, 377, 379, 381, 383, 385, 387, 389, 392, 394, 396, 398, 400, 402, 404, 408, 410, 412, 414, 419, 423, 425, 427, 432, 434, 441, 443, 445, 451, 458, 460, 462, 465, 469, 471, 473, 475, 477, 481, 485, 487, 489, 491, 494, 496, 498, 505, 507, 510, 512, 514, 520, 522, 524, 527, 530, 533, 535, 538, 542, 544, 546, 548, 553, 555, 557, 559, 561, 564, 566, 568, 570, 572, 576, 578, 580, 582, 584, 586, 588, 590, 592, 594, 596, 599, 601, 607, 612, 614, 617, 621, 624, 626, 628, 631, 635, 640, 644, 646, 648, 650, 654, 656, 658, 661, 663, 665, 668, 678, 679, 680, 681, 682, 683, 684, 685, 686, 687, 688, 690, 692, 694, and 696, or a fragment thereof, wherein a plant produced from said plant cell has a difference in the level of biomass as compared to the corresponding level of a control plant that does not comprise said nucleic acid.

21. A transgenic plant comprising the plant cell of claim 19.

22. The transgenic plant of claim 21, wherein said plant is a member of a species selected from the group consisting of Panicum virgatum (switchgrass), Sorghum bicolor (sorghum, sudangrass), Miscanthus giganteus (miscanthus), Saccharum sp. (energycane), Populus balsamifera (poplar), Zea mays (corn), Glycine max (soybean), Brassica napus (canola), Triticum aestivum (wheat), Gossypium hirsutum (cotton), Oryza sativa (rice), Helianthus annuus (sunflower), Medicago sativa (alfalfa), Beta vulgaris (sugarbeet), or Pennisetum glaucum (pearl millet).

23. A transgenic plant comprising the plant cell of claim 21, wherein said polypeptide is selected from the group consisting of SEQ ID NO: 1, 2, 4, 6, 8, 10, 11, 12, 13, 14, 15, 16, 17, 18, 20, 22, 24, 25, 27, 29, 30, 32, 33, 34, 36, 37, 38, 39, 40, 41, 43, 45, 47, 49, 50, 51, 53, 54, 56, 58, 59, 61, 63, 64, 66, 68, 70, 71, 72, 74, 75, 77, 79, 81, 82, 84, 86, 87, 88, 90, 92, 94, 96, 98, 100, 102, 104, 106, 108, 110, 112, 114, 115, 117, 118, 120, 121, 122, 123, 125, 127, 129, 131, 132, 133, 135, 137, 139, 141, 142, 144, 145, 146, 147, 149, 151, 152, 153, 154, 155, 156, 158, 160, 162, 163, 164, 166, 168, 169, 171, 173, 174, 176, 178, 180, 182, 184, 185, 186, 188, 189, 190, 191, 193, 194, 195, 196, 198, 200, 202, 203, 204, 206, 207, 209, 210, 212, 214, 216, 218, 220, 222, 224, 226, 228, 230, 232, 234, 236, 238, 239, 241, 242, 243, 244, 245, 246, 247, 248, 249, 250, 251, 253, 255, 257, 259, 261, 263, 264, 266, 268, 269, 271, 273, 275, 276, 278, 279, 281, 282, 283, 285, 287, 289, 291, 292, 294, 295, 296, 297, 298, 299, 300, 302, 304, 305, 306, 308, 310, 311, 312, 314, 315, 317, 319, 320, 321, 323, 324, 326, 327, 329, 331, 332, 334, 336, 337, 338, 340, 342, 343, 345, 347, 349, 351, 353, 354, 356, 357, 359, 361, 363, 365, 367, 369, 371, 372, 374, 376, 378, 380, 382, 384, 386, 388, 390, 391, 393, 395, 397, 399, 401, 403, 405, 406, 407, 409, 411, 413, 415, 416, 417, 418, 420, 421, 422, 424, 426, 428, 429, 430, 431, 433, 435, 436, 437, 438, 439, 440, 442, 444, 446, 447, 448, 449, 450, 452, 453, 454, 455, 456, 457, 459, 461, 463, 464, 466, 467, 468, 470, 472, 474, 476, 478, 479, 480, 482, 483, 484, 486, 488, 490, 492, 493, 495, 497, 499, 500, 501, 502, 503, 504, 506, 508, 509, 511, 513, 515, 516, 517, 518, 519, 521, 523, 525, 526, 528, 529, 531, 532, 534, 536, 537, 539, 540, 541, 543, 545, 547, 549, 550, 551, 552, 554, 556, 558, 560, 562, 563, 565, 567, 569, 571, 573, 574, 575, 577, 579, 581, 583, 585, 587, 589, 591, 593, 595, 597, 598, 600, 602, 603, 604, 605, 606, 608, 609, 610, 611, 613, 615, 616, 618, 619, 620, 622, 623, 625, 627, 629, 630, 632, 633, 634, 636, 637, 638, 639, 641, 642, 643, 645, 647, 649, 651, 652, 653, 655, 657, 659, 660, 662, 664, 666, 667, 669, 670, 671, 672, 673, 674, 675, 676, 677, 689, 691, 693, 695, and 697.

24. A seed product comprising embryonic tissue from a transgenic plant according to claims 23.

25.-37. (canceled)

38. A plant cell containing a modified endogenous nucleic acid encoding a polypeptide, wherein the HMM bit score of the amino acid sequence of said polypeptide is greater than about 65, said HMM based on the amino acid sequences depicted in one of FIGS. 1-11, and wherein a plant produced from said plant cell has a difference in the level of biomass as compared to the corresponding level of a control plant where said nucleic acid has not been modified.

39. A plant cell containing a modified biomass-modulating endogenous nucleic acid, said nucleic acid comprising a nucleotide sequence with an open reading frame having 80 percent or greater sequence identity to the nucleotide sequence selected from the group consisting of SEQ ID NO: 3, 5, 7, 9, 19, 21, 23, 26, 28, 31, 35, 42, 44, 46, 48, 52, 55, 57, 60, 62, 65, 67, 69, 73, 76, 78, 80, 83, 85, 89, 91, 93, 95, 97, 99, 101, 103, 105, 107, 109, 111, 113, 116, 119, 124, 126, 128, 130, 134, 136, 138, 140, 143, 148, 150, 157, 159, 161, 165, 167, 170, 172, 175, 177, 179, 181, 183, 187, 192, 197, 199, 201, 205, 208, 211, 213, 215, 217, 219, 221, 223, 225, 227, 229, 231, 233, 235, 237, 240, 252, 254, 256, 258, 260, 262, 265, 267, 270, 272, 274, 277, 280, 284, 286, 288, 290, 293, 301, 303, 307, 309, 313, 316, 318, 322, 325, 328, 330, 333, 335, 339, 341, 344, 346, 348, 350, 352, 355, 358, 360, 362, 364, 366, 368, 370, 373, 375, 377, 379, 381, 383, 385, 387, 389, 392, 394, 396, 398, 400, 402, 404, 408, 410, 412, 414, 419, 423, 425, 427, 432, 434, 441, 443, 445, 451, 458, 460, 462, 465, 469, 471, 473, 475, 477, 481, 485, 487, 489, 491, 494, 496, 498, 505, 507, 510, 512, 514, 520, 522, 524, 527, 530, 533, 535, 538, 542, 544, 546, 548, 553, 555, 557, 559, 561, 564, 566, 568, 570, 572, 576, 578, 580, 582, 584, 586, 588, 590, 592, 594, 596, 599, 601, 607, 612, 614, 617, 621, 624, 626, 628, 631, 635, 640, 644, 646, 648, 650, 654, 656, 658, 661, 663, 665, 668, 678, 679, 680, 681, 682, 683, 684, 685, 686, 687, 688, 690, 692, 694, and 696, and wherein a plant produced from said plant cell has a difference in the level of biomass as compared to the corresponding level of a control plant where said nucleic acid has not been modified.

40. The plant cell of claim 39, wherein said endogenous nucleic acid encodes a polypeptide having 80 percent or greater sequence identity to an amino acid sequence selected from the group consisting of SEQ ID NO: 1, 2, 4, 6, 8, 10, 11, 12, 13, 14, 15, 16, 17, 18, 20, 22, 24, 25, 27, 29, 30, 32, 33, 34, 36, 37, 38, 39, 40, 41, 43, 45, 47, 49, 50, 51, 53, 54, 56, 58, 59, 61, 63, 64, 66, 68, 70, 71, 72, 74, 75, 77, 79, 81, 82, 84, 86, 87, 88, 90, 92, 94, 96, 98, 100, 102, 104, 106, 108, 110, 112, 114, 115, 117, 118, 120, 121, 122, 123, 125, 127, 129, 131, 132, 133, 135, 137, 139, 141, 142, 144, 145, 146, 147, 149, 151, 152, 153, 154, 155, 156, 158, 160, 162, 163, 164, 166, 168, 169, 171, 173, 174, 176, 178, 180, 182, 184, 185, 186, 188, 189, 190, 191, 193, 194, 195, 196, 198, 200, 202, 203, 204, 206, 207, 209, 210, 212, 214, 216, 218, 220, 222, 224, 226, 228, 230, 232, 234, 236, 238, 239, 241, 242, 243, 244, 245, 246, 247, 248, 249, 250, 251, 253, 255, 257, 259, 261, 263, 264, 266, 268, 269, 271, 273, 275, 276, 278, 279, 281, 282, 283, 285, 287, 289, 291, 292, 294, 295, 296, 297, 298, 299, 300, 302, 304, 305, 306, 308, 310, 311, 312, 314, 315, 317, 319, 320, 321, 323, 324, 326, 327, 329, 331, 332, 334, 336, 337, 338, 340, 342, 343, 345, 347, 349, 351, 353, 354, 356, 357, 359, 361, 363, 365, 367, 369, 371, 372, 374, 376, 378, 380, 382, 384, 386, 388, 390, 391, 393, 395, 397, 399, 401, 403, 405, 406, 407, 409, 411, 413, 415, 416, 417, 418, 420, 421, 422, 424, 426, 428, 429, 430, 431, 433, 435, 436, 437, 438, 439, 440, 442, 444, 446, 447, 448, 449, 450, 452, 453, 454, 455, 456, 457, 459, 461, 463, 464, 466, 467, 468, 470, 472, 474, 476, 478, 479, 480, 482, 483, 484, 486, 488, 490, 492, 493, 495, 497, 499, 500, 501, 502, 503, 504, 506, 508, 509, 511, 513, 515, 516, 517, 518, 519, 521, 523, 525, 526, 528, 529, 531, 532, 534, 536, 537, 539, 540, 541, 543, 545, 547, 549, 550, 551, 552, 554, 556, 558, 560, 562, 563, 565, 567, 569, 571, 573, 574, 575, 577, 579, 581, 583, 585, 587, 589, 591, 593, 595, 597, 598, 600, 602, 603, 604, 605, 606, 608, 609, 610, 611, 613, 615, 616, 618, 619, 620, 622, 623, 625, 627, 629, 630, 632, 633, 634, 636, 637, 638, 639, 641, 642, 643, 645, 647, 649, 651, 652, 653, 655, 657, 659, 660, 662, 664, 666, 667, 669, 670, 671, 672, 673, 674, 675, 676, 677, 689, 691, 693, 695, and 697, and wherein a plant produced from said plant cell has a difference in the level of biomass as compared to the corresponding level of a control plant where said nucleic acid has not been modified.

41. A method of modulating the level of biomass in a plant, said method comprising introducing into a plant cell an exogenous nucleic acid, said exogenous nucleic acid encoding a polypeptide having E.C. 2.6.1.83 activity.

42. A plant cell comprising an exogenous nucleic acid, said exogenous nucleic acid encoding a polypeptide having E.C. 2.6.1.83 activity, and wherein a plant produced from said plant cell has a difference in the level of biomass as compared to the corresponding level of a control plant that does not comprise said nucleic acid.
